United States Patent Application Publication US 2024/0209332 A1 - sequence listing, part 2

SEQ ID NO: 3117 - protein, 163 aa, unidentified
  REGION 1..163: note = Description of Unknown: uncultivated organism with predicted taxonomy: Prevotella
  REGION 1..163: note = MG16-215 RuvC-III domain
RQSQYIAKKSVEMLQQVCKNVYTTSGSVTDFVRHQWGYDDLLHDLNFERFKKAGLTAMVKQLHSGKEVEMERIKDWTKRLDNRHHAVDALAIACTTQGMIQRLNTLNASRDEILEELNSKDQRVVDPERSMLEKWVYAQPHISYAEAKNEIDKIVISQRPNTR

SEQ ID NO: 3118 - protein, 163 aa, unidentified
  REGION 1..163: note = Description of Unknown: uncultivated organism with predicted taxonomy: Bacteroidales
  REGION 1..163: note = MG16-216 RuvC-III domain
RQSQYIAKKSVEMLQQVCKNVYTTTGSVTDFVRHQWGYDEILHDLNFERFKKAELTTMVTQLHSGKEVEVERITNWTKRLDNRHHAVDALAIACTTQGMIQRLNTLSACRNEMLDELNSKDERVIDPERSMLEKWINSQPHICYAQAKDEVDKIIVSQRPNTR

SEQ ID NO: 3119 - protein, 163 aa, unidentified
  REGION 1..163: note = Description of Unknown: uncultivated organism with predicted taxonomy: Porphyromonas catoniae
  REGION 1..163: note = MG16-217 RuvC-III domain
RQSQYIAKKSVEMLQQVCKNVYTTSGSVTDFVRHQWGYDELLHDLNFERFKKAGLTAMVKQLHSGEEVEVERIANWTKRLDNRHHAVDALAIACTTQSMIQRLNTLNASRDDMLEELNSKDQRLVDPERSMLEKWVFIQPHITYADAKKEIDKIVISQRPNTR

SEQ ID NO: 3120 - protein, 163 aa, unidentified
  REGION 1..163: note = Description of Unknown: uncultivated organism with predicted taxonomy: Prevotella
  REGION 1..163: note = MG16-218 RuvC-III domain
RQSQYIAKKSVEMLQQVCKNVYTTSGSITDFVRHQWGYDELLHELNFERFKKAGLTAMVKQLQSGKEVEVERIKDWTKRLDNRHHAVDALAIACTTQGMIQRLNTLNASRADMLEELSSNDRRLVDPDRSMLEKWIYVQPHISYAEAKNEIDKIVISQRPNTR

SEQ ID NO: 3121 - protein, 162 aa, unidentified
  REGION 1..162: note = Description of Unknown: uncultivated organism with predicted taxonomy: Fibrobacter
  REGION 1..162: note = MG16-219 RuvC-III domain
RQTQYISKKALEMLKEVCCKVYATNGSVTDFIRHTWGYDEILHQLNFDRYKQGGLTEVREFDNKGIIHKEERIQNWSKRLDHRHHAIDALVIAMTKQSIIQRLNHLNTERDAMFQEVDKQSAEWKNDFSLLQEWLRERKHFSTKDVADRVAEILISFKAGKR

SEQ ID NO: 3122 - protein, 163 aa, unidentified
  REGION 1..163: note = Description of Unknown: uncultivated organism with predicted taxonomy: Sediminibacterium sp. C3
  REGION 1..163: note = MG16-220 RuvC-III domain
RQSQYIAKKSVEMLQQVCKNVYTTTGSVTDFVRHQWGYDEILHDLNFERFKKAELTTMVTQLHSGKEVEVERITNWTKRLDNRHHAVDALAIACTTQGMIQRLNTLNACRNEMLDELNSKDERVIDPERSMLEKWINSQPHICYAQAKDEVDKIIVSQRPNTR

SEQ ID NO: 3123 - protein, 163 aa, unidentified
  REGION 1..163: note = Description of Unknown: uncultivated organism with predicted taxonomy: Sediminibacterium sp. C3
  REGION 1..163: note = MG16-221 RuvC-III domain
RQSQYIAKKSVEMLQQVCKNVYTTSGSVTDFVRHQWGYDEILHDLNFERFKKAGLTAMVKQLHSGKEVEVERIMDWTKRLDNRHHAVDALTIACTTQGMIQRLNTLNASRDEMLEELNSKDQRVVDPERSMLEKWIFVQPHISYVEAKNEIDKIVISQRPNTR

SEQ ID NO: 3124 - protein, 163 aa, unidentified
  REGION 1..163: note = Description of Unknown: uncultivated organism with predicted taxonomy: Prevotella sp. ne3005
  REGION 1..163: note = MG16-222 RuvC-III domain
RQSQYIAKKSVEMLLQVCKNVYTTSGSVTDFVRHQWGYDELLHDLNFDRFKKAGLTAMVKQLHSGKEVEVERIKDWTKRLDNRHHAVDALTIACTTQGMIQRLNTLNASREDILEELNSKDQRLVDPERSMLEKWVFVQPHISYSEAKNEIDKIVISQRPNTR

SEQ ID NO: 3125 - protein, 163 aa, unidentified
  REGION 1..163: note = Description of Unknown: uncultivated organism with predicted taxonomy: Prevotella copri
  REGION 1..163: note = MG16-223 RuvC-III domain
RQSQYIAKKSVEILQQVCKNVYTTSGSVTDFVRHQWGYDEILHDLNFEHFKKANLTTMVKQLHSGKEVEVERIKDWTKRLDNRHHAVDALAIACTTQGMIQRLNTLNASRDAMLDELNNKEQRMIDSERSMLEKWIISQPHVSYAEAKKEIDKILISLRPNTR

SEQ ID NO: 3126 - protein, 135 aa, unidentified
  REGION 1..135: note = Description of Unknown: uncultivated organism with predicted taxonomy: Bacteroides sp. CAG:770
  REGION 1..135: note = MG16-224 RuvC-III domain
RQSQYIAKKSVEMLQQVCKNVYTTSGSVTDFVRHQWGYDELLHELNIERFKKAGLTAMVKQLHSGKEVEVERIKDWTKRLDNRHHAVDAFAIACTTQGMIQRLNTLNASRDEMFEELNTKDQRLIDPERSMLEKW

SEQ ID NO: 3127 - protein, 162 aa, unidentified
  REGION 1..162: note = Description of Unknown: uncultivated organism with predicted taxonomy: Bacteroidales
  REGION 1..162: note = MG16-225 RuvC-III domain
RQSQYISKKAVEILRSAIRDVYATSGSVTDFLRHIWGYDQILHNLNLPKYRDAELTEFVTYDHRGQEHQEERIKNWSKRIDHRHHAIDALTIALTRQGYIQRLNNLNASHDDIAEAVRKVNPLMEKKYSLLEKYIYIQPHFTVQEVTDKVDGILVSFRAGKK

SEQ ID NO: 3128 - protein, 20 aa, unidentified
  REGION 1..20: note = Description of Unknown: uncultivated organism
  REGION 1..20: note = MG16-226 RuvC-III domain
RLSQYIATKAVEILQQGIRQ

SEQ ID NO: 3129 - protein, 165 aa, unidentified
  REGION 1..165: note = Description of Unknown: uncultivated organism with predicted taxonomy: Bacteroidales
  REGION 1..165: note = MG16-228 RuvC-III domain
RQSQYIAKKAAEILRQGYRNVYATSGSVTDFLRHQWGYDEILHRLNLPRYQQVEGLTELVTYDHCGQEHQQERIKGWTKRLDHRHHAIDALTIALTQQSVIQRLNTLNTSREQMFDDLGKRTDTPEYTEKRSLLENWIDAQPHFSVQEVTDKVDGILVSFRAGKR

SEQ ID NO: 3130 - protein, 165 aa, unidentified; identical to SEQ ID NO: 3129
  REGION 1..165: note = Description of Unknown: uncultivated organism with predicted taxonomy: Bacteroidales
  REGION 1..165: note = MG16-229 RuvC-III domain

SEQ ID NO: 3131 - protein, 150 aa, unidentified
  REGION 1..150: note = Description of Unknown: uncultivated organism with predicted taxonomy: Bacteroides sp. CAG:545
  REGION 1..150: note = MG16-230 RuvC-III domain
VQTQYISRKAMEILKQVCHNVYGSSGEVTSYLRRIWGYDEILHSLDLPRYREGGMTAEVSYDHRGQTHTEERIKDWSKRLDHRHHAIDALTIACTRQSIIQRLNNLSAMTAVAGESMSLDKWTLAQPHFSVQEASDNVSRILVSFKAGKK

SEQ ID NO: 3132 - protein, 150 aa, unidentified
  REGION 1..150: note = Description of Unknown: uncultivated organism with predicted taxonomy: Bacteroides sp. CAG:770
  REGION 1..150: note = MG16-231 RuvC-III domain
VQTQYISRKAMEILNQVCRNVYGSSGDVTAYLRRIWGYDEILHSLDLPRYREGNLTGDVTYVHRGQTHTEERIRDWSKRLDHRHHAIDALTIACTRQSIIQRLNILNAKTAIGEEQMSLDKWTLAQAHFSVADVADHVADILVSFKSGKR

SEQ ID NO: 3133 - protein, 150 aa, unidentified
  REGION 1..150: note = Description of Unknown: uncultivated organism with predicted taxonomy: Bacteroides sp. CAG:770
  REGION 1..150: note = MG16-232 RuvC-III domain
VQTQYISRKAMEILKQVCHNVYGSSGEVTSYLRRIWGYDEILHSLDLPRYREGGMTAEVSYDHRGQTHTEERIKDWSKRLDHRHHAIDALTIACTRQSIIQRLNNLSAMTAVAGESMSLDKWTLSQPHFSVQEVSDNVSRILVSFKAGKK

SEQ ID NO: 3134 - protein, 150 aa, unidentified; identical to SEQ ID NO: 2934
  REGION 1..150: note = Description of Unknown: uncultivated organism with predicted taxonomy: Bacteroides sp. CAG:545
  REGION 1..150: note = MG16-233 RuvC-III domain

SEQ ID NO: 3135 - protein, 150 aa, unidentified
  REGION 1..150: note = Description of Unknown: uncultivated organism with predicted taxonomy: Bacteroides sp. CAG:770
  REGION 1..150: note = MG16-234 RuvC-III domain
VQTQYISRKAMEILNQVCRNVYGSSGDVTAYLRRIWGYDEILHSLDLPRYREGNLTGDVTYVHRGQTHTEERIKDWSKRLDHRHHAIDALTIACTRQSIIQRLNTLNAKTAIGEEQISLDKWTLAQAHFSVADVADHVADILVSFKSGKR

SEQ ID NO: 3136 - protein, 150 aa, unidentified; identical to SEQ ID NO: 3135
  REGION 1..150: note = Description of Unknown: uncultivated organism with predicted taxonomy: Bacteroides sp. CAG:770
  REGION 1..150: note = MG16-235 RuvC-III domain

SEQ ID NO: 3137 - protein, 150 aa, unidentified
  REGION 1..150: note = Description of Unknown: uncultivated organism with predicted taxonomy: Bacteroides sp. CAG:770
  REGION 1..150: note = MG16-236 RuvC-III domain
VQTQYISRKAMEILNQVCRNVYGSSGDVTASLRRIWGYDEILHSLDLPRYREGNLTGDVTYVHKGQTHTEERIKDWSKRLDHRHHAIDALTIASTRQSIIQRLNTLNAKTAIGEEQISLDKWTLAQAHFSVADVADHVADILVSFKSGKK

SEQ ID NO: 3138 - protein, 150 aa, unidentified; identical to SEQ ID NO: 2925
  REGION 1..150: note = Description of Unknown: uncultivated organism with predicted taxonomy: Bacteroides sp. CAG:770
  REGION 1..150: note = MG16-237 RuvC-III domain

SEQ ID NO: 3139 - protein, 150 aa, unidentified; identical to SEQ ID NO: 2925
  REGION 1..150: note = Description of Unknown: uncultivated organism with predicted taxonomy: Bacteroides sp. CAG:545
  REGION 1..150: note = MG16-238 RuvC-III domain

SEQ ID NO: 3140 - protein, 150 aa, unidentified; identical to SEQ ID NO: 2939
  REGION 1..150: note = Description of Unknown: uncultivated organism with predicted taxonomy: Bacteroides sp. CAG:770
  REGION 1..150: note = MG16-239 RuvC-III domain

SEQ ID NO: 3141 - protein, 150 aa, unidentified; identical to SEQ ID NO: 2939
  REGION 1..150: note = Description of Unknown: uncultivated organism with predicted taxonomy: Bacteroides sp. CAG:709
  REGION 1..150: note = MG16-240 RuvC-III domain

SEQ ID NO: 3142 - protein, 150 aa, unidentified; identical to SEQ ID NO: 2939
  REGION 1..150: note = Description of Unknown: uncultivated organism with predicted taxonomy: Bacteroides sp. CAG:770
  REGION 1..150: note = MG16-242 RuvC-III domain

SEQ ID NO: 3143 - protein, 150 aa, unidentified; identical to SEQ ID NO: 2939
  REGION 1..150: note = Description of Unknown: uncultivated organism with predicted taxonomy: Bacteroides sp. CAG:709
  REGION 1..150: note = MG16-243 RuvC-III domain

SEQ ID NO: 3144 - protein, 163 aa, unidentified
  REGION 1..163: note = Description of Unknown: uncultivated organism with predicted taxonomy: Bacteroidales
  REGION 1..163: note = MG16-245 RuvC-III domain
RQSQYIAVKAVEILQTGIRRVWTSGGSVTDFLRHQWGYDEILHTLNLPRYRKVDELTEIVHFEHAGQEHEEERIKNWTKRIDHRHHAIDALTVALTQQSYIQRLNTLEASHEWMEKQVKEANTAYNEKKSILERWVADQPHFSVADVTNKVDGILVSFRAGKR

SEQ ID NO: 3145 - protein, 163 aa, unidentified
  REGION 1..163: note = Description of Unknown: uncultivated organism with predicted taxonomy: Bacteroides sp. CAG:770
  REGION 1..163: note = MG16-246 RuvC-III domain
RQSQYIARKSVEMLQQVCKDVYTTSGSVTDFVRHQWGYDEILHDLNFERFKKAGLTTMVTQLHSGKEVEVERIKDWTKRLDNRHHAVDALAIACTTQGMIQRLNTLNASREGILDELNSKEERVVDPERSMLEKWIYTQPHISYAQAKEAIDNIIISQRPNIR

SEQ ID NO: 3146 - protein, 163 aa, unidentified
  REGION 1..163: note = Description of Unknown: uncultivated organism with predicted taxonomy: Porphyromonas sp. oral taxon 278
  REGION 1..163: note = MG16-247 RuvC-III domain
RQSQYIAVKAVEILQTGVRRVWTSGGSVTDFLRHQWGYDEILHTLNLPRYRQVEALTEIVHYEHAGQEHNEERIKNWTKRTDHRHHAIDALTVALTQQSYIQRLNTLEASHDWMEKQVKEANTPYNEKKSVLERWVADQPHFSVAEVTDKVDGILVSFRAGKR

SEQ ID NO: 3147 - protein, 163 aa, unidentified
  REGION 1..163: note = Description of Unknown: uncultivated organism with predicted taxonomy: Coprobacter sp.
  REGION 1..163: note = MG16-248 RuvC-III domain
RQSQYIAVKAVEILQAGIRHVWTSGGSVTDFLRHQWGYDEILHTLNLPRYRKVDELTEIVHFEHAGQEHEEERIKNWTKRIDHRHHAIDALTVALTQQSYIQRLNTLEASHDWMEKQVKEVNTPYNEKKSVLERWIADQPHFSVSDVTDKVDGILVSFRAGKR

SEQ ID NO: 3148 - protein, 162 aa, unidentified; identical to SEQ ID NO: 3057
  REGION 1..162: note = Description of Unknown: uncultivated organism with predicted taxonomy: Bacteroides sp. CAG:144
  REGION 1..162: note = MG16-249 RuvC-III domain

SEQ ID NO: 3149 - protein, 163 aa, unidentified
  REGION 1..163: note = Description of Unknown: uncultivated organism with predicted taxonomy: Sediminibacterium sp. C3
  REGION 1..163: note = MG16-250 RuvC-III domain
RQSQYIAKKSVEMLQQVCKNVYTTSGSVTDFVRHQWGYDELLHDLNFDRFKKAGLTAMVKQLHSGKEVEVERIKDWTKRLDNRHHAVDALAIACTTQGMIQRLNTLNASRDVMLEELSSNDQRLVDPERSMLEKWIYVQPHISYAEAKNEVDKIVISQRPNTR

SEQ ID NO: 3150 - protein, 159 aa, unidentified
  REGION 1..159: note = Description of Unknown: uncultivated organism with predicted taxonomy: Bacteroides sp. CAG:144
  REGION 1..159: note = MG16-251 RuvC-III domain
RLSQYISKKSQELLKMACRNVVATSGNITDLVRHTWGYDTILHELNFPCYKEAGLTTFIKDENTGQQREVIKDWTKRLDHRHHAIDALAVACTSRSIVQRINTLHASREEMREDVKSPRKDWEDNDLLQQWIKEKMPFDRDYVLHKVASILVSMKAGKK

SEQ ID NO: 3151 - protein, 162 aa, unidentified
  REGION 1..162: note = Description of Unknown: uncultivated organism with predicted taxonomy: Bacteroidales
  REGION 1..162: note = MG16-252 RuvC-III domain
RQSQYISKKAVEMLKLVCRNVWTTSGSITDFLRHNWGYDQILHDLNLPRYSLGGMTESVHYEHNGQKHEEERIIGWTKRLDHRHHAIDALTIASTQQSYIQRLNTLSASRDVMHAEVEKQGVQWQEKHSLLEEWTAQRPHLPYSTVRDYVDGILVSFKPGKK

SEQ ID NO: 3152 - protein, 159 aa, unidentified
  REGION 1..159: note = Description of Unknown: uncultivated organism
  REGION 1..159: note = MG16-253 RuvC-III domain
RLSQYISKKAQELLKAACREVMATSGSITDLIRHTWGYDTILHELNFPRYKDAGLTEIIKDEETGMQREVIPDWSKRLDHRHHAIDALAVACTSRSIVQRINTLNASREIIREEIKTSRKEWEDNDLLQQWIKEKMPFDRQYVVQKVASILVSMKAGKK

SEQ ID NO: 3153 - protein, 163 aa, unidentified
  REGION 1..163: note = Description of Unknown: uncultivated organism with predicted taxonomy: Marinilabiliaceae
  REGION 1..163: note = MG16-254 RuvC-III domain
RQSQYIAVKAVEVLQDGIRQVWTSGGSVTDFLRHQWGYDEILHTLNLPRYRQVEGLTELVDFEHAGQKHTEERIKNWSKRIDHRHHAIDALTVALTQQGYIQRLNTLEASHDFMEKQVKEAGTKYNEKKSILEKWINEQPHFSVEEVTNAVDRILVSFRAGKR

SEQ ID NO: 3154 - protein, 163 aa, unidentified
  REGION 1..163: note = Description of Unknown: uncultivated organism with predicted taxonomy: Bacteroidetes
  REGION 1..163: note = MG16-255 RuvC-III domain
RLSQNIARSAMELLRQVCHNVYATSGSVTDFVRHQWGYDNILHDLNFSRFAKSGNTEFITVVGADGKETQQERIKGWSKRMDNRHHAVDALAIALTTQSMIQRINNLNASREFMQKDVEASKEKFKEKKSLLEKWVAIQPHLSYGQAKDAISGILVSQRSGKH

SEQ ID NO: 3155 - protein, 159 aa, unidentified; identical to SEQ ID NO: 3150
  REGION 1..159: note = Description of Unknown: uncultivated organism with predicted taxonomy: Bacteroides sp. CAG:144
  REGION 1..159: note = MG16-256 RuvC-III domain

SEQ ID NO: 3156 - protein, 165 aa, unidentified
  REGION 1..165: note = Description of Unknown: uncultivated organism with predicted taxonomy: Bacteroidia
  REGION 1..165: note = MG16-257 RuvC-III domain
RQSQYIAVKAVEILQQGIRQVWTSGGSVTDFLRHLWGYDEILHTLNLPRYRQVEELTEIVHYEHAGQEHDEERIKNWSKRIDHRHHAIDALTVALTRQAYIQRLNSLNAEFTREEMLKEVEEANTVYNEKKSLLEKWVNEQPHFSVDDVTQSVDSILVSFRAGKR

SEQ ID NO: 3157 - protein, 163 aa, unidentified; identical to SEQ ID NO: 3146
  REGION 1..163: note = Description of Unknown: uncultivated organism with predicted taxonomy: Bacteroidales
  REGION 1..163: note = MG16-258 RuvC-III domain

SEQ ID NO: 3158 - protein, 162 aa, unidentified
  REGION 1..162: note = Description of Unknown: uncultivated organism with predicted taxonomy: Prevotella saccharolytica
  REGION 1..162: note = MG16-259 RuvC-III domain
RQTQYIAKKALEMLKDVCYNVYATSGSVTDFIRHTWGYDEILHQLNYDRYKKGGLTEFREYDHKGETHTEERIQDWSKRLDHRHHAIDALVIAMTRQSIIQRLNHLNTERDAMFQEVEKQRKEWKNDYSMLQEWLRERKHFSAEDVAKKVSDILVSFKAGKR

SEQ ID NO: 3159 - protein, 163 aa, unidentified; identical to SEQ ID NO: 3154
  REGION 1..163: note = Description of Unknown: uncultivated organism with predicted taxonomy: Bacteroides sp. CAG:770
  REGION 1..163: note = MG16-260 RuvC-III domain

SEQ ID NO: 3160 - protein, 162 aa, unidentified
  REGION 1..162: note = Description of Unknown: uncultivated organism with predicted taxonomy: Bacteroidales
  REGION 1..162: note = MG16-261 RuvC-III domain
RQTQYISKKALELLREICHNVYATSGSVTDFIRHTWGYDEILHQLNFDRYKQSGLTEIREFDNKGEIHKEERIQKWNKRLDHRHHAIDALVIAMTKQSIIQRLNHLNTERDAMFQEVEKQSIEWKNDFSLLQEWLRERKHFSTKDVANRVANILISFKAGKR

SEQ ID NO: 3161 - protein, 120 aa, unidentified
  REGION 1..120: note = Description of Unknown: uncultivated organism with predicted taxonomy: Porphyromonas catoniae
  REGION 1..120: note = MG16-262 RuvC-III domain
RQSQYIAKKSVEMLLQVCKNVYTTSGSVTDFVRHQWGYDELLHDLNFDRFKKAGLTAMVKQLHSGKEVEVERIKDWTKRLDNRHHAVDALAIACTTQGMIQRLNTLNASRDEMLEELNGK

SEQ ID NO: 3162 - protein, 163 aa, unidentified
  REGION 1..163: note = Description of Unknown: uncultivated organism with predicted taxonomy: Sediminibacterium sp. C3
  REGION 1..163: note = MG16-263 RuvC-III domain
RLSQYIAKKSVEMLQQVCRNVYSTSGSVTDFVRHQWGYDELLHDLNFERYKRAGLTAMVTQLRSGKEVEVERIKDWTKRLDNRHHAVDALAIACTTQGMIQRLNTLNASREDILDELNKTEERNDDSERSMLEKWICSQPHISYAEAKDELDKIIISQRPSTR

SEQ ID NO: 3163 - protein, 166 aa, unidentified
  REGION 1..166: note = Description of Unknown: uncultivated organism
  REGION 1..166: note = MG16-264 RuvC-III domain
GETQYISRESIRILKQCCRNVNATSGTVTATLRHLWGYDEILHQLNFERYKQAGLTETVTWTSNHGKNEHSKEQIVDWSKRIDHRHHAIDALVVACTQQGFIQRINTLNADDTKDLMRKQIESAGIKFEEKKVLLDKYLASFVPFTTKVVADEVNKILVSFKAGKK

SEQ ID NO: 3164 - protein, 163 aa, unidentified
  REGION 1..163: note = Description of Unknown: uncultivated organism
  REGION 1..163: note = MG16-265 RuvC-III domain
RQSQYIAKKSVEMLQLVCRNVYTTSGSVTETVRRLWGYNELLHDLNFERFKKAGLTTMVTQLHSGEEIEVERIKDWTKRLDNRHHAVDALAIACTTQGMIQRLNTLNASRDDMLKELNSQEQRVVDPEHSMLEKWIYTQPHISYVQAKEAIEKIIISQRPNTR

SEQ ID NO: 3165 - protein, 162 aa, unidentified; identical to SEQ ID NO: 3095
  REGION 1..162: note = Description of Unknown: uncultivated organism with predicted taxonomy: Porphyromonas sp. oral taxon 278
  REGION 1..162: note = MG16-266 RuvC-III domain

SEQ ID NO: 3166 - protein, 163 aa, unidentified
  REGION 1..163: note = Description of Unknown: uncultivated organism
  REGION 1..163: note = MG16-267 RuvC-III domain
RQSQYIAKKSVEMLLQVCKNVYTTSGSVTDFVRHQWGYDELLHDLNFERFKKAGLTAMVKQLHSGEEVEVERIANWTKRLDNRHHAVDALAIACTTQSMIQRLNTLNASRDDMLEELNSKDQRLVDPERSMLEKWVFIQPHITYADAKKEIDKIVISQRPNTR

SEQ ID NO: 3167 - protein, 163 aa, unidentified
  REGION 1..163: note = Description of Unknown: uncultivated organism with predicted taxonomy: Prevotella
  REGION 1..163: note = MG16-268 RuvC-III domain
SLSQYISRKAMEILQTGCRKVYATSGSITDIERHLWGYDTILHELNFPRYKCAGLTTVIKEEYEEGIITEKEVITNWSKRKDNRHHAIDALVIACTTQDTIQRINTLHASRDELQKETSGNPVFYSEKSTLLERWIKGKQPIPRHEVLEQVKQIAISIKAGKK

SEQ ID NO: 3168 - protein, 163 aa, unidentified; identical to SEQ ID NO: 3118
  REGION 1..163: note = Description of Unknown: uncultivated organism with predicted taxonomy: Bacteroidales
  REGION 1..163: note = MG16-269 RuvC-III domain

SEQ ID NO: 3169 - protein, 163 aa, unidentified
  REGION 1..163: note = Description of Unknown: uncultivated organism with predicted taxonomy: Bacteroidales
  REGION 1..163: note = MG16-270 RuvC-III domain
RQSQYIAVKAVEILQTGIRRVWTSGGSVTDFLRHQWGYDEILHTLNLPRYRKVDELTEIVHFEHAGQEHEEERIKNWTKRIDHRHHAIDALTVALTQQSYIQRLNTLEASHEWMEKQVKEANTAYNEKKSVLERWVADQPHFSVADVTDKVDGILVSFRAGKR

SEQ ID NO: 3170 - protein, 164 aa, unidentified
  REGION 1..164: note = Description of Unknown: uncultivated organism with predicted taxonomy: Bacteroidales
  REGION 1..164: note = MG16-271 RuvC-III domain
RQSQYIAAKAVEILQTAIRDVHATSGSVTELLRHQWGYDEILHHLNLPRYNKADLTEIVQYDHAGQKHTVERIKNWNKRLDQRHHAVDALTIALTKQSYIQRLNTLNASRETIYNEVEQADAKLRNEEKRTLLENWVAIQPHFPVKDVEDKVAGILVSFRAGKR

SEQ ID NO: 3171 - protein, 163 aa, unidentified
  REGION 1..163: note = Description of Unknown: uncultivated organism with predicted taxonomy: Bacteroides sp. CAG:770
  REGION 1..163: note = MG16-272 RuvC-III domain
RQSQYIAKKSVEMLQQVCKNVYTTSGSVTDFVRHQWGYDELLHELNFERFKKAGLTAMVKQLHSGKEIEVERIKDWTKRLDNRHHAVDALAIACTTQGMIQRLNTLNASRDEMQEELSSKEQRLVDPERSMLEKWIFAQPHISYAEAKNEIDKIIISQRPNTR

SEQ ID NO: 3172 - protein, 163 aa, unidentified
  REGION 1..163: note = Description of Unknown: uncultivated organism with predicted taxonomy: Bacteroidetes
  REGION 1..163: note = MG16-273 RuvC-III domain
RLSQYIAKKSVEMLQQVCKNVYATSGSITDFVRHQWGYDELLHDLNFERFKKAGLTTMVKQLHSGEEVEVERIANWTKRLDNRHHAVDALAIACTTQSMIQRLNTLNASRDDMLEEQNSKDQRLVDPERSMLEKWVFIQPHITYADAKKEIDKIVISQRPNTR

SEQ ID NO: 3173 - protein, 159 aa, unidentified
  REGION 1..159: note = Description of Unknown: uncultivated organism with predicted taxonomy: Bacteroidales
  REGION 1..159: note = MG16-274 RuvC-III domain
RLSQYISKKAQELLKTACREVMATSGSITDLIRHTWGYDTILHELNFPRYKDAGLTEIIKDEETGMQRELIPDWSKRLDHRHHAIDALAVACTSRSIVQRINTLHASREIIRDEIKTSRKEWEDNDLLQQWIKEKMPFDRQYVVQKVASILVSMKAGKK

SEQ ID NO: 3174 - protein, 166 aa, unidentified; identical to SEQ ID NO: 3163
  REGION 1..166: note = Description of Unknown: uncultivated organism with predicted taxonomy: Bacteroidetes
  REGION 1..166: note = MG16-275 RuvC-III domain

SEQ ID NO: 3175 - protein, 134 aa, unidentified
  REGION 1..134: note = Description of Unknown: uncultivated organism with predicted taxonomy: Clostridiales
  REGION 1..134: note = MG18-1 RuvC-III domain
VETRQSTKAAAHLLEQLLPNTEVVYVKAGLAADFRQEFGFVKCRDANDFHHAKDAYLNAVVGNVYHEKFTKNPLRFVRSGQEYSLNLSALFQNWNIYKGGRVIWQKGEDGSLETVRARMAKNDPMVTRYCTEGR

SEQ ID NO: 3176 - protein, 136 aa, unidentified
  REGION 1..136: note = Description of Unknown: uncultivated organism with predicted taxonomy: Phascolarctobacterium succinatutens
  REGION 1..136: note = MG18-3 RuvC-III domain
VETRQSTKAVATILKTAYKHSEVVYVKAGNVSDFRHQFKFVKCREVNDLHHAKDAYLNIVVGNCYYVKFTANPLNFIKKNQDSRSYSLKPEIFYKFNIKRDDDIAWLGGEDGTMATVARTMHKNNILFTRQAVEGK

SEQ ID NO: 3177 - protein, 136 aa, unidentified
  REGION 1..136: note = Description of Unknown: uncultivated organism with predicted taxonomy: Phascolarctobacterium succinatutens
  REGION 1..136: note = MG18-4 RuvC-III domain
VETRQSTKAVATILKTAYKHSEIVYVKAGNVSDFRQKFEFVKCRDVNDLHHAKDAYLNIVVGNCYHVKFTDKPMDFIKKNQDNRSYSLKPEIFYKFSIKRDSEIAWVGGKDGTITTVTKTMHKNNILFTRQPVEGK

SEQ ID NO: 3178 - protein, 136 aa, unidentified
  REGION 1..136: note = Description of Unknown: uncultivated organism with predicted taxonomy: Phascolarctobacterium succinatutens
  REGION 1..136: note = MG18-5 RuvC-III domain
VETRQSTKAVAAILKTAYQNSEVVYVKAGNVSDFRKQFKFVKCRDVNDLHHAKDAYLNIVVGNCYHVKFTANPLNFITKNQDNRRYSLKPEIFYKFSIKRDGEIAWIGGKDGTITTVTKTMHKNNILFTRQPVEGK

SEQ ID NO: 3179 - protein, 136 aa, unidentified
  REGION 1..136: note = Description of Unknown: uncultivated organism with predicted taxonomy: Phascolarctobacterium
  REGION 1..136: note = MG18-6 RuvC-III domain
VETRQSTKAVAAILKTAYQNSEVVYVKAGNVSDFRQQFNFVKCRDVNDLHHAKDAYLNIVVGNCYHVKFTANPLNFITKNQDNRRYSLKPEIFYKFNIKRDDDIAWLGGEDGTMAIVARTMHKNNILFTRQAVEGK

SEQ ID NO: 3180 - protein, 136 aa, unidentified
  REGION 1..136: note = Description of Unknown: uncultivated organism with predicted taxonomy: Acidaminococcales
  REGION 1..136: note = MG18-7 RuvC-III domain
VETRQSTKATADILKSAYEHSEVVYVKAGNVSDFRQQFDFVKCREVNDLHHAKDAYLNIVVGNCYHVKFTINPLMFIRGNQDNRRYSLKPEVFYAHDIKRNGEIAWLAGDNGTMATVKRVMQKNNVLFTRLAVEGK

SEQ ID NO: 3181 - protein, 136 aa, unidentified
  REGION 1..136: note = Description of Unknown: uncultivated organism
  REGION 1..136: note = MG18-8 RuvC-III domain
VETRQSTKAVATILKTAYKHSEVVYVKAGNVSDFRQQFKFVKCREVNDLHHAKDAYLNIVVGNCYYVKFTANPLNFIKKNQDSRSYSLKPEIFYKFNIKRDDDIAWLGGEDGTMATVARTMHKNNILFTRQAVEGK

SEQ ID NO: 3182 - protein, 136 aa, unidentified
  REGION 1..136: note = Description of Unknown: uncultivated organism with predicted taxonomy: Phascolarctobacterium succinatutens
  REGION 1..136: note = MG18-9 RuvC-III domain
VETRQSTKAVATILKTAYQNSEVVYVKAGNVSDFRQQFKFVKCREVNDLHHAKDAYLNIVVGNCYHVKFTANPLNFITKNQDNRRYSLKPEIFYKFSIKRDGEIAWLGGEDGTMATVARTMHKNNILFTRQAVEGK

SEQ ID NO: 3183 - protein, 136 aa, unidentified; identical to SEQ ID NO: 3182
  REGION 1..136: note = Description of Unknown: uncultivated organism with predicted taxonomy: Phascolarctobacterium
  REGION 1..136: note = MG18-10 RuvC-III domain

SEQ ID NO: 3184 - protein, 136 aa, unidentified
  REGION 1..136: note = Description of Unknown: uncultivated organism with predicted taxonomy: Phascolarctobacterium succinatutens
  REGION 1..136: note = MG18-11 RuvC-III domain
VETRQSTKAVAAILKIAYQNSEVVYVKAGNVSDFRQQFKFVKCREVNDLHHAKDAYLNIVVGNCYHVKFTANPLNFITKNQDNRRYSLKPEIFYKFSIKRDGEIAWLGGEDGTMATVARTMHKNNILFTRQAVEGK

SEQ ID NO: 3185 - protein, 136 aa, unidentified
  REGION 1..136: note = Description of Unknown: uncultivated organism with predicted taxonomy: Phascolarctobacterium succinatutens
  REGION 1..136: note = MG18-12 RuvC-III domain
VETRQSTKAVATILKTAYKHSEVVYVKAGNVSDFRQQFKFVKCREVNDLHHAKDAYLNIVVGNCYYVKFTANPLNFIKKNQDSRSYSLKPEIFYKFNIKRDDDIAWLGGEDGTMATVARTMHKNNILFTRQPLEGK

SEQ ID NO: 3186 - protein, 136 aa, unidentified; identical to SEQ ID NO: 3177
  REGION 1..136: note = Description of Unknown: uncultivated organism with predicted taxonomy: Phascolarctobacterium succinatutens
  REGION 1..136: note = MG18-13 RuvC-III domain

SEQ ID NO: 3187 - protein, 136 aa, unidentified; identical to SEQ ID NO: 3182
  REGION 1..136: note = Description of Unknown: uncultivated organism with predicted taxonomy: Phascolarctobacterium
  REGION 1..136: note = MG18-14 RuvC-III domain

SEQ ID NO: 3188 - protein, 136 aa, unidentified
  REGION 1..136: note = Description of Unknown: uncultivated organism with predicted taxonomy: Phascolarctobacterium succinatutens
  REGION 1..136: note = MG18-15 RuvC-III domain
VETRQSTKAVAAILKTAYQNSEVVYVKAGNVSDFRQQFKFEKCREVNDLHHAKDAYLNIVVGNCYHVKFTANPLNFITKNQDNRRYSLKPEIFYKFSIKRDGEIAWLGGEDGTMATVARTMHKNNILFTRQAVEGK

SEQ ID NO: 3189 - protein, 136 aa, unidentified; identical to SEQ ID NO: 3185
  REGION 1..136: note = Description of Unknown: uncultivated organism with predicted taxonomy: Phascolarctobacterium succinatutens
  REGION 1..136: note = MG18-16 RuvC-III domain

SEQ ID NO: 3190 - protein, 136 aa, unidentified; identical to SEQ ID NO: 3182
  REGION 1..136: note = Description of Unknown: uncultivated organism with predicted taxonomy: Phascolarctobacterium
  REGION 1..136: note = MG18-17 RuvC-III domain

SEQ ID NO: 3191 - protein, 136 aa, unidentified; identical to SEQ ID NO: 3182
  REGION 1..136: note = Description of Unknown: uncultivated organism with predicted taxonomy: Phascolarctobacterium succinatutens
  REGION 1..136: note = MG18-18 RuvC-III domain

SEQ ID NO: 3192 - protein, 136 aa, unidentified; identical to SEQ ID NO: 3182
  REGION 1..136: note = Description of Unknown: uncultivated organism with predicted taxonomy: Phascolarctobacterium
  REGION 1..136: note = MG18-19 RuvC-III domain

SEQ ID NO: 3193 - protein, 136 aa, unidentified; identical to SEQ ID NO: 3182
  REGION 1..136: note = Description of Unknown: uncultivated organism with predicted taxonomy: Phascolarctobacterium
  REGION 1..136: note = MG18-20 RuvC-III domain

SEQ ID NO: 3194 - protein, 136 aa, unidentified; identical to SEQ ID NO: 3182
  REGION 1..136: note = Description of Unknown: uncultivated organism with predicted taxonomy: Phascolarctobacterium
  REGION 1..136: note = MG18-21 RuvC-III domain

SEQ ID NO: 3195 - protein, 136 aa, unidentified; identical to SEQ ID NO: 3177
  REGION 1..136: note = Description of Unknown: uncultivated organism with predicted taxonomy: Phascolarctobacterium
  REGION 1..136: note = MG18-22 RuvC-III domain

SEQ ID NO: 3196 - protein, 136 aa, unidentified
  REGION 1..136: note = Description of Unknown: uncultivated organism with predicted taxonomy: Phascolarctobacterium succinatutens
  REGION 1..136: note = MG18-23 RuvC-III domain
VETRQSTKAVAAILKTAYQNSEVVYVKAGNVSDFRQQFKFVKCREVNDLHHAKDAYLNIVVGNCYHVKFTANPLNFITKNQDNRRYSLKPEIFYKFSIKRDGEIAWLGGEDGTMATVVRTMHKNNILFTRQAVEGK

SEQ ID NO: 3197 - protein, 136 aa, unidentified
  REGION 1..136: note = Description of Unknown: uncultivated organism with predicted taxonomy: Phascolarctobacterium
  REGION 1..136: note = MG18-24 RuvC-III domain
VETRQSTKAVAAILKTAYQNSEVVYVKAGNVSDFRQQFKFVKCREVNDLHHAKDAYLNIVVGNCYHVKFTANPLNFITKNQDNRRYSLKPEIFYKFSIKRDGEIAWLGGEDGTMATVARTMHKNNILFTRQAVEGK

SEQ ID NO: 3198 - protein, 136 aa, unidentified; identical to SEQ ID NO: 3182
  REGION 1..136: note = Description of Unknown: uncultivated organism with predicted taxonomy: Phascolarctobacterium succinatutens
  REGION 1..136: note = MG18-25 RuvC-III domain

SEQ ID NO: 3199 - protein, 136 aa, unidentified; identical to SEQ ID NO: 3182
  REGION 1..136: note = Description of Unknown: uncultivated organism with predicted taxonomy: Phascolarctobacterium succinatutens
  REGION 1..136: note = MG18-26 RuvC-III domain

SEQ ID NO: 3200 - protein, 136 aa, unidentified; identical to SEQ ID NO: 3197
  REGION 1..136: note = Description of Unknown: uncultivated organism with predicted taxonomy: Phascolarctobacterium succinatutens
  REGION 1..136: note = MG18-27 RuvC-III domain

SEQ ID NO: 3201 - protein, 136 aa, unidentified
  REGION 1..136: note = Description of Unknown: uncultivated organism with predicted taxonomy: Phascolarctobacterium
  REGION 1..136: note = MG18-28 RuvC-III domain
VETRQSTKAVAAILKTAYQNSEVVYVKAGNVSDFRQQFNFVKCRDVNDLHHAKDAYLNIVVGNCYHVKFTANPLNFITKNQDNRRYSLKPEIFYKFSIKRDGEIAWLGGEDGTMATVARTMHKNNILFTRQAVEGK

SEQ ID NO: 3202 - protein, 136 aa, unidentified; identical to SEQ ID NO: 3197
  REGION 1..136: note = Description of Unknown: uncultivated organism with predicted taxonomy: Phascolarctobacterium succinatutens
  REGION 1..136: note = MG18-29 RuvC-III domain

SEQ ID NO: 3203 - protein, 136 aa, unidentified
  REGION 1..136: note = Description of Unknown: uncultivated organism with predicted taxonomy: Phascolarctobacterium succinatutens
  REGION 1..136: note = MG18-30 RuvC-III domain
VETRQSTKAVAAILKTAYQNSEVVYVKAGNVSDFRQQFKFVKCRDVNDLHHAKDAYLNIVVGNCYHVKFTANPLNFITKNQDNRRYSLKPEIFYKFSIKRDSEIAWIGGKDGTITTVTKTMHKNNILFTRQPVEGK

SEQ ID NO: 3204 - protein, 136 aa, unidentified; identical to SEQ ID NO: 3203
  REGION 1..136: note = Description of Unknown: uncultivated organism with predicted taxonomy: Phascolarctobacterium succinatutens
  REGION 1..136: note = MG18-31 RuvC-III domain

SEQ ID NO: 3205 - protein, 136 aa, unidentified
  REGION 1..136: note = Description of Unknown: uncultivated organism with predicted taxonomy: Phascolarctobacterium succinatutens
  REGION 1..136: note = MG18-32 RuvC-III domain
VETRQSTKAVAAILKTAYQNSEVVYVKAGNVSDFRQQFKFVKCREVNDLHHAKDAYLNIVVGNCYHVKFTANPLNFITKNQDNRRYSLKPEIFYKFSIKRDSEIAWIGGKDGTITTVTKTMHKNNILFTRQPVEGK

SEQ ID NO: 3206 - protein, 136 aa, unidentified; identical to SEQ ID NO: 3182
  REGION 1..136: note = Description of Unknown: uncultivated organism with predicted taxonomy: Phascolarctobacterium succinatutens
  REGION 1..136: note = MG18-33 RuvC-III domain

SEQ ID NO: 3207 - protein, 136 aa, unidentified; identical to SEQ ID NO: 3182
  REGION 1..136: note = Description of Unknown: uncultivated organism with predicted taxonomy: Phascolarctobacterium succinatutens
  REGION 1..136: note = MG18-34 RuvC-III domain

SEQ ID NO: 3208 - protein, 136 aa, unidentified; identical to SEQ ID NO: 3185
  REGION 1..136: note = Description of Unknown: uncultivated organism with predicted taxonomy: Phascolarctobacterium succinatutens
  REGION 1..136: note = MG18-35 RuvC-III domain

SEQ ID NO: 3209 - protein, 136 aa, unidentified; identical to SEQ ID NO: 3182
  REGION 1..136: note = Description of Unknown: uncultivated organism with predicted taxonomy: Phascolarctobacterium succinatutens
  REGION 1..136: note = MG18-36 RuvC-III domain

SEQ ID NO: 3210 - protein, 136 aa, unidentified; identical to SEQ ID NO: 3197
  REGION 1..136: note = Description of Unknown: uncultivated organism with predicted taxonomy: Phascolarctobacterium succinatutens
  REGION 1..136: note = MG18-37 RuvC-III domain

SEQ ID NO: 3211 - protein, 136 aa, unidentified; identical to SEQ ID NO: 3203
  REGION 1..136: note = Description of Unknown: uncultivated organism with predicted taxonomy: Phascolarctobacterium
  REGION 1..136: note = MG18-38 RuvC-III domain

SEQ ID NO: 3212 - protein, 136 aa, unidentified; identical to SEQ ID NO: 3205
  REGION 1..136: note = Description of Unknown: uncultivated organism with predicted taxonomy: Phascolarctobacterium
  REGION 1..136: note = MG18-39 RuvC-III domain

SEQ ID NO: 3213 - protein, 136 aa, unidentified
  REGION 1..136: note = Description of Unknown: uncultivated organism with predicted taxonomy: Phascolarctobacterium succinatutens
  REGION 1..136: note = MG18-40 RuvC-III domain
VETRQSTKAVAAILKTAYQNSEVVYVKAGNVSDFRQQFKFVKCREVNDLHHAKDAYLNIVVGNCYHVKFTANPLNFITKNQDNRRYSLKPEIFYKFSIKRDGEIAWLGGEDGTMATVARTMHKNNILFTRQPLEGK

SEQ ID NO: 3214 - protein, 136 aa, unidentified
  REGION 1..136: note = Description of Unknown: uncultivated organism with predicted taxonomy: Phascolarctobacterium succinatutens
  REGION 1..136: note = MG18-41 RuvC-III domain
VETRQSTKAVAAILKTAYQNSEVVYVKAGNVSDFRQQFKFVKCRDVNDLHHAKDAYLNIVVGNCYHVKFTAHPLNFITKNQDNRRYSLKPEIFYKFSIKRDGEIAWLGGEDGTMATVARTMHKNNILFTRQAVEGK

SEQ ID NO: 3215 - protein, 136 aa, unidentified; identical to SEQ ID NO: 3176
  REGION 1..136: note = Description of Unknown: uncultivated organism with predicted taxonomy: Phascolarctobacterium succinatutens
  REGION 1..136: note = MG18-42 RuvC-III domain

SEQ ID NO: 3216 - protein, 136 aa, unidentified; identical to SEQ ID NO: 3185
  REGION 1..136: note = Description of Unknown: uncultivated organism with predicted taxonomy: Phascolarctobacterium succinatutens
  REGION 1..136: note = MG18-43 RuvC-III domain

SEQ ID NO: 3217 - protein, 136 aa, unidentified; identical to SEQ ID NO: 3197
  REGION 1..136: note = Description of Unknown: uncultivated organism with predicted taxonomy: Phascolarctobacterium succinatutens
  REGION 1..136: note = MG18-44 RuvC-III domain

SEQ ID NO: 3218 - protein, 136 aa, unidentified; identical to SEQ ID NO: 3197
  REGION 1..136: note = Description of Unknown: uncultivated organism with predicted taxonomy: Phascolarctobacterium succinatutens
  REGION 1..136: note = MG18-45 RuvC-III domain

SEQ ID NO: 3219 - protein, 136 aa, unidentified
  REGION 1..136: note = Description of Unknown: uncultivated organism with predicted taxonomy: Phascolarctobacterium
  REGION 1..136: note = MG18-46 RuvC-III domain
VETRQSTKAVAAILKTAYQNSEVVYVKAGNVSDFRQQFKFVKCREVNDLHHAKDAYLNIVVGNCYHVKFTANHLNFITKNQDNRRYSLKPEIFYKFSIKRDGEIAWLGGEDGTMATVARTMHKNNILFTRQAVEGK

SEQ ID NO: 3220 - protein, 136 aa, unidentified; identical to SEQ ID NO: 3180
  REGION 1..136: note = Description of Unknown: uncultivated organism with predicted taxonomy: Phascolarctobacterium
  REGION 1..136: note = MG18-47 RuvC-III domain

SEQ ID NO: 3221 - protein, 136 aa, unidentified; identical to SEQ ID NO: 3197
  REGION 1..136: note = Description of Unknown: uncultivated organism with predicted taxonomy: Phascolarctobacterium succinatutens
  REGION 1..136: note = MG18-48 RuvC-III domain

SEQ ID NO: 3222 - protein, 136 aa, unidentified; identical to SEQ ID NO: 3197
  REGION 1..136: note = Description of Unknown: uncultivated organism with predicted taxonomy: Phascolarctobacterium succinatutens
  REGION 1..136: note = MG18-49 RuvC-III domain

SEQ ID NO: 3223 - protein, 136 aa, unidentified; identical to SEQ ID NO: 3182
  REGION 1..136: note = Description of Unknown: uncultivated organism with predicted taxonomy: Phascolarctobacterium succinatutens
  REGION 1..136: note = MG18-50 RuvC-III domain

SEQ ID NO: 3224 - protein, 136 aa, unidentified
  REGION 1..136: note = Description of Unknown: uncultivated organism with predicted taxonomy: Phascolarctobacterium succinatutens
  REGION 1..136: note = MG18-51 RuvC-III domain
VETRQSTKAVAAILKTAYKHSEIVYVKAGNVSDFRQKFEFVKCRDVNDLHHAKDAYLNIVVGNCYHVKFTANPLNFITKNQDNRRYSLKPEIFYKFSIKRDSEIAWIGGKDGTITTVTKTMHKNNILFTRQPVEGK

SEQ ID NO: 3225 - protein, 136 aa, unidentified; identical to SEQ ID NO: 3197
  REGION 1..136: note = Description of Unknown: uncultivated organism with predicted taxonomy: Phascolarctobacterium succinatutens
  REGION 1..136: note = MG18-52 RuvC-III domain

SEQ ID NO: 3226 - protein, 136 aa, unidentified; identical to SEQ ID NO: 3203
  REGION 1..136: note = Description of Unknown: uncultivated organism with predicted taxonomy: Firmicutes
  REGION 1..136: note = MG18-53 RuvC-III domain

SEQ ID NO: 3227 - protein, 136 aa, unidentified
  REGION 1..136: note = Description of Unknown: uncultivated organism with predicted taxonomy: Phascolarctobacterium
  REGION 1..136: note = MG18-54 RuvC-III domain
VETRQSTKAVATILKTAYKHSEIVYVKAGNVSDFRQKFEFVKCRDVNDLHHAKNAYLNIVVGNCYYVKFTAKPLDFIKKNQDNRSYSLKPEIFYKFSIKRDSEIAWVGGKDGTITTVTKTIHKNNILFTRQPVEGK

SEQ ID NO: 3228 - protein, 136 aa, unidentified; identical to SEQ ID NO: 3197
  REGION 1..136: note = Description of Unknown: uncultivated organism with predicted taxonomy: Phascolarctobacterium
  REGION 1..136: note = MG18-55 RuvC-III domain

SEQ ID NO: 3229 - protein, 136 aa, unidentified; identical to SEQ ID NO: 3182
  REGION 1..136: note = Description of Unknown: uncultivated organism with predicted taxonomy: Phascolarctobacterium succinatutens
  REGION 1..136: note = MG18-56 RuvC-III domain

SEQ ID NO: 3230 - protein, 136 aa, unidentified; identical to SEQ ID NO: 3197
  REGION 1..136: note = Description of Unknown: uncultivated organism with predicted taxonomy: Phascolarctobacterium succinatutens
  REGION 1..136: note = MG18-57 RuvC-III domain

SEQ ID NO: 3231 - protein, 136 aa, unidentified
  REGION 1..136: note = Description of Unknown: uncultivated organism with predicted taxonomy: Phascolarctobacterium succinatutens
  REGION 1..136: note = MG18-58 RuvC-III domain
VETRQSTKAVAAILKTAYQNSEVVYVKAGNVSDFRQQFKFVKCREVNDLHHAKDAYLNIVVGNCHHVKFTANPLNFITKNQDNRRYSLKPEIFYKFSIKRDGEIAWLGGEDGTMATVARTMHKNNILFTRQAVEGK

SEQ ID NO: 3232 - protein, 136 aa, unidentified; identical to SEQ ID NO: 3203
  REGION 1..136: note = Description of Unknown: uncultivated organism with predicted taxonomy: Phascolarctobacterium succinatutens
  REGION 1..136: note = MG18-59 RuvC-III domain

SEQ ID NO: 3233 - protein, 136 aa, unidentified; identical to SEQ ID NO: 3197
  REGION 1..136: note = Description of Unknown: uncultivated organism
  REGION 1..136: note = MG18-60 RuvC-III domain

SEQ ID NO: 3234 - protein, 136 aa, unidentified
  REGION 1..136: note = Description of Unknown: uncultivated organism with predicted taxonomy: Phascolarctobacterium succinatutens
  REGION 1..136: note = MG18-61 RuvC-III domain
VETRQSTKAVAAILKTAYQNSEVVYVKAGNVSDFRQQFKFVKCRELNDLHHAKDAYLNIVVGNCYHVKFTANPLNFITKNQDNRRYSLKPEIFYKFSIKRDGEIAWLGGEDGTMATVARTMHKNNILFTRQAVEGK

SEQ ID NO: 3235 - protein, 136 aa, unidentified; identical to SEQ ID NO: 3185
  REGION 1..136: note = Description of Unknown: uncultivated organism with predicted taxonomy: Phascolarctobacterium succinatutens
  REGION 1..136: note = MG18-62 RuvC-III domain

SEQ ID NO: 3236 - protein, 136 aa, unidentified; identical to SEQ ID NO: 3197
  REGION 1..136: note = Description of Unknown: uncultivated organism
  REGION 1..136: note = MG18-63 RuvC-III domain

SEQ ID NO: 3237 - protein, 136 aa, unidentified
  REGION 1..136: note = Description of Unknown: uncultivated organism with predicted taxonomy: Phascolarctobacterium succinatutens
  REGION 1..136: note = MG18-64 RuvC-III domain
VETRQSTKAVAAILKTAYQNSEVVYVKAGNVSDFRQQFKFVKCRDVNDLHHAKDAYLNIVVGNCYHVKFTANPLNFITKNQDNRRYSLKPEIFYKFSIKRDGEIAWLGGEDGTMATVARTMHKNNILFTRQAVEGK

SEQ ID NO: 3238 - protein, 136 aa, unidentified; identical to SEQ ID NO: 3213
  REGION 1..136: note = Description of Unknown: uncultivated organism with predicted taxonomy: Firmicutes
  REGION 1..136: note = MG18-65 RuvC-III domain

SEQ ID NO: 3239 - protein, 136 aa, unidentified; identical to SEQ ID NO: 3197
  REGION 1..136: note = Description of Unknown: uncultivated organism with predicted taxonomy: Phascolarctobacterium succinatutens
  REGION 1..136: note = MG18-66 RuvC-III domain

SEQ ID NO: 3240 - protein, 136 aa, unidentified; identical to SEQ ID NO: 3184
  REGION 1..136: note = Description of Unknown: uncultivated organism
  REGION 1..136: note = MG18-67 RuvC-III domain

SEQ ID NO: 3241 - protein, 136 aa, unidentified; identical to SEQ ID NO: 3197
  REGION 1..136: note = Description of Unknown: uncultivated organism with predicted taxonomy: Phascolarctobacterium succinatutens
  REGION 1..136: note = MG18-68 RuvC-III domain

SEQ ID NO: 3242 - protein, 136 aa, unidentified; identical to SEQ ID NO: 3197
  REGION 1..136: note = Description of Unknown: uncultivated organism with predicted taxonomy: Phascolarctobacterium succinatutens
  REGION 1..136: note = MG18-69 RuvC-III domain

SEQ ID NO: 3243 - protein, 136 aa, unidentified; identical to SEQ ID NO: 3181
  REGION 1..136: note = Description of Unknown: uncultivated organism with predicted taxonomy: Negativicutes
  REGION 1..136: note = MG18-70 RuvC-III domain

SEQ ID NO: 3244 - protein, 136 aa, unidentified; identical to SEQ ID NO: 3197
  REGION 1..136: note = Description of Unknown: uncultivated organism with predicted taxonomy: Phascolarctobacterium succinatutens
  REGION 1..136: note = MG18-71 RuvC-III domain

SEQ ID NO: 3245 - protein, 136 aa, unidentified; identical to SEQ ID NO: 3213
  REGION 1..136: note = Description of Unknown: uncultivated organism with predicted taxonomy: Phascolarctobacterium succinatutens
  REGION 1..136: note = MG18-72 RuvC-III domain

SEQ ID NO: 3246 - protein, 136 aa, unidentified; identical to SEQ ID NO: 3224
  REGION 1..136: note = Description of Unknown: uncultivated organism with predicted taxonomy: Phascolarctobacterium
  REGION 1..136: note = MG18-73 RuvC-III domain

SEQ ID NO: 3247 - protein, 136 aa, unidentified
  REGION 1..136: note = Description of Unknown: uncultivated organism with predicted taxonomy: Phascolarctobacterium succinatutens
  REGION 1..136: note = MG18-74 RuvC-III domain
VETRQSTKAVAAILKTAYQNSEVVYVKAGNVSDFRQQFKFVKCREVNDLHHAKDAYLNIVVGNCYHVKFTANPLNFITKNQDNRRYSLKPEIFYKFSIKRDSEIAWIGGKDGTITTVTKTMHKNNILFTRQAVEGK

SEQ ID NO: 3248 - protein, 136 aa, unidentified; identical to SEQ ID NO: 3179
  REGION 1..136: note = Description of Unknown: uncultivated organism with predicted taxonomy: Phascolarctobacterium
  REGION 1..136: note = MG18-75 RuvC-III domain

SEQ ID NO: 3249 - protein, 136 aa, unidentified; identical to SEQ ID NO: 3178
  REGION 1..136: note = Description of Unknown: uncultivated organism with predicted taxonomy: Phascolarctobacterium succinatutens
  REGION 1..136: note = MG18-76 RuvC-III domain

SEQ ID NO: 3250 - protein, 136 aa, unidentified; identical to SEQ ID NO: 3197
  REGION 1..136: note = Description of Unknown: uncultivated organism with predicted taxonomy: Phascolarctobacterium
  REGION 1..136: note = MG18-78 RuvC-III domain

SEQ ID NO: 3251 - protein, 136 aa, unidentified; identical to SEQ ID NO: 3197
  REGION 1..136: note = Description of Unknown: uncultivated organism with predicted taxonomy: Phascolarctobacterium succinatutens
  REGION 1..136: note = MG18-79 RuvC-III domain

SEQ ID NO: 3252 - protein, 136 aa, unidentified; identical to SEQ ID NO: 3196
  REGION 1..136: note = Description of Unknown: uncultivated organism with predicted taxonomy: Phascolarctobacterium succinatutens
  REGION 1..136: note = MG18-80 RuvC-III domain

SEQ ID NO: 3253 - protein, 136 aa, unidentified; identical to SEQ ID NO: 3180
  REGION 1..136: note = Description of Unknown: uncultivated organism with predicted taxonomy: Phascolarctobacterium succinatutens
  REGION 1..136: note = MG18-81 RuvC-III domain

SEQ ID NO: 3254 - protein, 136 aa, unidentified; identical to SEQ ID NO: 3185
  REGION 1..136: note = Description of Unknown: uncultivated organism with predicted taxonomy: Phascolarctobacterium succinatutens
  REGION 1..136: note = MG18-82 RuvC-III domain

SEQ ID NO: 3255 - protein, 136 aa, unidentified; identical to SEQ ID NO: 3201
  REGION 1..136: note = Description of Unknown: uncultivated organism with predicted taxonomy: Phascolarctobacterium succinatutens
  REGION 1..136: note = MG18-83 RuvC-III domain

SEQ ID NO: 3256 - protein, 136 aa, unidentified; identical to SEQ ID NO: 3185
  REGION 1..136: note = Description of Unknown: uncultivated organism with predicted taxonomy: Phascolarctobacterium succinatutens
  REGION 1..136: note = MG18-84 RuvC-III domain

SEQ ID NO: 3257 - protein, 136 aa, unidentified; identical to SEQ ID NO: 3197
  REGION 1..136: note = Description of Unknown: uncultivated organism with predicted taxonomy: Phascolarctobacterium
  REGION 1..136: note = MG18-85 RuvC-III domain

SEQ ID NO: 3258 - protein, 136 aa, unidentified; identical to SEQ ID NO: 3182
  REGION 1..136: note = Description of Unknown: uncultivated organism with predicted taxonomy: Phascolarctobacterium succinatutens
  REGION 1..136: note = MG18-86 RuvC-III domain

SEQ ID NO: 3259 - protein, 136 aa, unidentified; identical to SEQ ID NO: 3197
  REGION 1..136: note = Description of Unknown: uncultivated organism with predicted taxonomy: Phascolarctobacterium succinatutens
  REGION 1..136: note = MG18-87 RuvC-III domain

SEQ ID NO: 3260 - protein, 136 aa, unidentified; identical to SEQ ID NO: 3179
  REGION 1..136: note = Description of Unknown: uncultivated organism with predicted taxonomy: Phascolarctobacterium
  REGION 1..136: note = MG18-88 RuvC-III domain

SEQ ID NO: 3261 - protein, 136 aa, unidentified
  REGION 1..136: note = Description of Unknown: uncultivated organism with predicted taxonomy: Firmicutes
  REGION 1..136: note = MG18-89 RuvC-III domain
VETRQSTKAVAAILKTAYQNSEVVYVKAGNVSDFRQQFKFVKCREVNDLHHAKDAYLNIVVGNCYHVKFTANPLNFITKNQDNRRYSLKPEIFYKFSIKRDGEIAWLGGEDGTMETVARTMHKNNILFTRQAVEGK

SEQ ID NO: 3262 - protein, 136 aa, unidentified; identical to SEQ ID NO: 3205
  REGION 1..136: note = Description of Unknown: uncultivated organism with predicted taxonomy: Phascolarctobacterium
  REGION 1..136: note = MG18-90 RuvC-III domain

SEQ ID NO: 3263 - protein, 136 aa, unidentified
  REGION 1..136: note = Description of Unknown: uncultivated organism with predicted taxonomy: Phascolarctobacterium succinatutens
  REGION 1..136: note = MG18-91 RuvC-III domain
VETRQSTKAVAAILKTAYQNSEVVYVKAGNVSDFRQQFNFVKCRDVNDLHHAKDAYLNIVVGNCYHVKFTANPLNFITKNQDNRRYSLKPEIFYKFNIKRDDDIAWLGGADGTMATVARTMHKNNILFTRQPLEGK

SEQ ID NO: 3264 - protein, 136 aa, unidentified; identical to SEQ ID NO: 3197
  REGION 1..136: note = Description of Unknown: uncultivated organism with predicted taxonomy: Phascolarctobacterium succinatutens
  REGION 1..136: note = MG18-92 RuvC-III domain

SEQ ID NO: 3265 - protein, 136 aa, unidentified
  REGION 1..136: note = Description of Unknown: uncultivated organism
  REGION 1..136: note = MG18-93 RuvC-III domain
VEMRQSTKAVATILKTAYKHSEVVYVKAGNVSDFRQQFKFVKCREVNDLHHAKDAYLNIVVGNCYYVKFTANPLNFIKKNQDSRSYSLKPEIFYKFNIKRDDDIAWLGGEDGTMATVARTMHKNNILFTRQPLEGK

SEQ ID NO: 3266 - protein, 136 aa, unidentified; identical to SEQ ID NO: 3197
  REGION 1..136: note = Description of Unknown: uncultivated organism with predicted taxonomy: Phascolarctobacterium succinatutens
  REGION 1..136: note = MG18-94 RuvC-III domain

SEQ ID NO: 3267 - protein, 136 aa, unidentified; identical to SEQ ID NO: 3213
  REGION 1..136: note = Description of Unknown: uncultivated organism
  REGION 1..136: note = MG18-95 RuvC-III domain

SEQ ID NO: 3268 - protein, 136 aa, unidentified; identical to SEQ ID NO: 3197
  REGION 1..136: note = Description of Unknown: uncultivated organism with predicted taxonomy: Clostridium sp. CAG:964
  REGION 1..136: note = MG18-96 RuvC-III domain

SEQ ID NO: 3269 - protein, 136 aa, unidentified; identical to SEQ ID NO: 3197
  REGION 1..136: note = Description of Unknown: uncultivated organism with predicted taxonomy: Phascolarctobacterium succinatutens
  REGION 1..136: note = MG18-97 RuvC-III domain

SEQ ID NO: 3270 - protein, 136 aa, unidentified
  REGION 1..136: note = Description of Unknown: uncultivated organism with predicted taxonomy: Phascolarctobacterium succinatutens
  REGION 1..136: note = MG18-98 RuvC-III domain
VETRQSTKAVAAILKTAYQNSEVVYVKAGNVSDFRQQFNFVKCRDVNDLHHAKDAYLNIVVGNCYHVKFTANPLNFITKNQDNRRYSLKPEFFYKFNIKRDDDIAWLGGADGTMATVARTMHKNNILFTRQPLEGK

SEQ ID NO: 3271 - protein, 136 aa, unidentified; identical to SEQ ID NO: 3178
  REGION 1..136: note = Description of Unknown: uncultivated organism with predicted taxonomy: Firmicutes
  REGION 1..136: note = MG18-99 RuvC-III domain

SEQ ID NO: 3272 - protein, 136 aa, unidentified; identical to SEQ ID NO: 3197
  REGION 1..136: note = Description of Unknown: uncultivated organism with predicted taxonomy: Phascolarctobacterium succinatutens
  REGION 1..136: note = MG18-100 RuvC-III domain

SEQ ID NO: 3273 - protein, 136 aa, unidentified; identical to SEQ ID NO: 3203
  REGION 1..136: note = Description of Unknown: uncultivated organism with predicted taxonomy: Firmicutes
  REGION 1..136: note = MG18-101 RuvC-III domain

SEQ ID NO: 3274 - protein, 136 aa, unidentified; identical to SEQ ID NO: 3237
  REGION 1..136: note = Description of Unknown: uncultivated organism with predicted taxonomy: Firmicutes
  REGION 1..136: note = MG18-102 RuvC-III domain

SEQ ID NO: 3275 - protein, 136 aa, unidentified
  REGION 1..136: note = Description of Unknown: uncultivated organism with predicted taxonomy: Phascolarctobacterium succinatutens
  REGION 1..136: note = MG18-103 RuvC-III domain
VETRQSTKAVAAILKTAYKHSEIVYVKAGNVSDFRQKFEFVKCRDVNDLHHAKDAYLNIVVGNCYHVKFTANPLNFITKNQDNRRYSLKPEIFYKFSIKRDSEIAWIGGKDGTITTVTKTMHKNNILFTRQAVEGK

SEQ ID NO: 3276 - protein, 136 aa, unidentified; identical to SEQ ID NO: 3197
  REGION 1..136: note = Description of Unknown: uncultivated organism with predicted taxonomy: Phascolarctobacterium
  REGION 1..136: note = MG18-104 RuvC-III domain

SEQ ID NO: 3277 - protein, 136 aa, unidentified; identical to SEQ ID NO: 3197
  REGION 1..136: note = Description of Unknown: uncultivated organism with predicted taxonomy: Phascolarctobacterium succinatutens
  REGION 1..136: note = MG18-105 RuvC-III domain

SEQ ID NO: 3278 - protein, 136 aa, unidentified; identical to SEQ ID NO: 3182
  REGION 1..136: note = Description of Unknown: uncultivated organism with predicted taxonomy: Firmicutes
  REGION 1..136: note = MG18-106 RuvC-III domain

SEQ ID NO: 3279 - protein, 136 aa, unidentified
  REGION 1..136: note = Description of Unknown: uncultivated organism with predicted taxonomy: Phascolarctobacterium succinatutens
  REGION 1..136: note = MG18-107 RuvC-III domain
VETRQSTKAVAAILKTAYQNSAVVYVKAGNVSDFRQQFKFVKCREVNDLHHAKDAYLNIVVGNCYHVKFTASPLNFITKNQDNRRYSLKPEIFYKFSIKRDGEIAWLGGEDGTMATVARTMHKNNILFTRQAVEGK

SEQ ID NO: 3280 - protein, 136 aa, unidentified; identical to SEQ ID NO: 3203
  REGION 1..136: note = Description of Unknown: uncultivated organism with predicted taxonomy: Ruminococcaceae bacterium
  REGION 1..136: note = MG18-108 RuvC-III domain

SEQ ID NO: 3281 - protein, 136 aa, unidentified; identical to SEQ ID NO: 3197
  REGION 1..136: note = Description of Unknown: uncultivated organism with predicted taxonomy: Phascolarctobacterium succinatutens
  REGION 1..136: note = MG18-109 RuvC-III domain

SEQ ID NO: 3282 - protein, 136 aa, unidentified; identical to SEQ ID NO: 3178
  REGION 1..136: note = Description of Unknown: uncultivated organism with predicted taxonomy: Phascolarctobacterium succinatutens
  REGION 1..136: note = MG18-111 RuvC-III domain

SEQ ID NO: 3283 - protein, 136 aa, unidentified; identical to SEQ ID NO: 3197
  REGION 1..136: note = Description of Unknown: uncultivated organism with predicted taxonomy: Phascolarctobacterium succinatutens
  REGION 1..136: note = MG18-112 RuvC-III domain

SEQ ID NO: 3284 - protein, 136 aa, unidentified
  REGION 1..136: note = Description of Unknown: uncultivated organism with predicted taxonomy: Clostridiales
  REGION 1..136: note = MG18-113 RuvC-III domain
VETRQSTKAVAAILKTAYQNSEVVYVKAGNVSDFRQQFKFVKCRDVNDLHHAKDAYLNIVVGNCYHVKFTANPLNFITKNQDNRRYSLKPEIFYKFSIKRDGEIAWLGGEDGTMATVARTMHKNNILFTRQPLEGK

SEQ ID NO: 3285 - protein, 136 aa, unidentified
  REGION 1..136: note = Description of Unknown: uncultivated organism with predicted taxonomy: Phascolarctobacterium
  REGION 1..136: note = MG18-114 RuvC-III domain
VETRQSTKAVAAILKTAYQNSEVVYVKAGNVSDFRQQFKFVKCREVNDLHHAKDAYQNIVVGNCYHVKFTANPLNFITKNQDNRRYSLKPEIFYKFSIKRDGEIAWLGGEDGTMATVARTMHKNNILFTRQAVEGK

SEQ ID NO: 3286 - protein, 136 aa, unidentified; identical to SEQ ID NO: 3224
  REGION 1..136: note = Description of Unknown: uncultivated organism with predicted taxonomy: Phascolarctobacterium succinatutens
  REGION 1..136: note = MG18-115 RuvC-III domain

SEQ ID NO: 3287 - protein, 136 aa, unidentified
  REGION 1..136: note = Description of Unknown: uncultivated organism with predicted taxonomy: Phascolarctobacterium succinatutens
  REGION 1..136: note = MG18-116 RuvC-III domain
VETRQSTKAVAAILKTAYQNSEVVYVKAGNVSDFRQQFKFVKCRDVNDLHHAKDAYLNIVVGNCYHVKFTANPLNFITKNQDNRRYSLKPEIFYKFNIKRDDDIAWLGGEDGTMATVARTMHKNNILFTRQAVEGK

SEQ ID NO: 3288 - protein, 136 aa, unidentified; identical to SEQ ID NO: 3197
  REGION 1..136: note = Description of Unknown: uncultivated organism with predicted taxonomy: Phascolarctobacterium
  REGION 1..136: note = MG18-117 RuvC-III domain

SEQ ID NO: 3289 - protein, 136 aa, unidentified; identical to SEQ ID NO: 3197
  REGION 1..136: note = Description of Unknown: uncultivated organism with predicted taxonomy: Phascolarctobacterium succinatutens
  REGION 1..136: note = MG18-118 RuvC-III domain

SEQ ID NO: 3290 - protein, 136 aa, unidentified; identical to SEQ ID NO: 3197
  REGION 1..136: note = Description of Unknown: uncultivated organism with predicted taxonomy: Phascolarctobacterium succinatutens
  REGION 1..136: note = MG18-119 RuvC-III domain

SEQ ID NO: 3291 - protein, 136 aa, unidentified; identical to SEQ ID NO: 3197
  REGION 1..136: note = Description of Unknown: uncultivated organism with predicted taxonomy: Phascolarctobacterium succinatutens
  REGION 1..136: note = MG18-120 RuvC-III domain

SEQ ID NO: 3292 - protein, 136 aa, unidentified; identical to SEQ ID NO: 3224
  REGION 1..136: note = Description of Unknown: uncultivated organism with predicted taxonomy: Phascolarctobacterium succinatutens
  REGION 1..136: note = MG18-121 RuvC-III domain

SEQ ID NO: 3293 - protein, 136 aa, unidentified; identical to SEQ ID NO: 3203
  REGION 1..136: note = Description of Unknown: uncultivated organism with predicted taxonomy: Phascolarctobacterium
  REGION 1..136: note = MG18-122 RuvC-III domain

SEQ ID NO: 3294 - protein, 136 aa, unidentified; identical to SEQ ID NO: 3197
  REGION 1..136: note = Description of Unknown: uncultivated organism with predicted taxonomy: Phascolarctobacterium succinatutens
  REGION 1..136: note = MG18-123 RuvC-III domain

SEQ ID NO: 3295 - protein, 136 aa, unidentified; identical to SEQ ID NO: 3284
  REGION 1..136: note = Description of Unknown: uncultivated organism with predicted taxonomy: Phascolarctobacterium succinatutens
  REGION 1..136: note = MG18-124 RuvC-III domain

SEQ ID NO: 3296 - protein, 136 aa, unidentified; identical to SEQ ID NO: 3205
  REGION 1..136: note = Description of Unknown: uncultivated organism with predicted taxonomy: Phascolarctobacterium
  REGION 1..136: note = MG18-125 RuvC-III domain

SEQ ID NO: 3297 - protein, 136 aa, unidentified; identical to SEQ ID NO: 3284
  REGION 1..136: note = Description of Unknown: uncultivated organism with predicted taxonomy: Phascolarctobacterium
  REGION 1..136: note = MG18-126 RuvC-III domain

SEQ ID NO: 3298 - protein, 136 aa, unidentified; identical to SEQ ID NO: 3185
  REGION 1..136: note = Description of Unknown: uncultivated organism with predicted taxonomy: Phascolarctobacterium
  REGION 1..136: note = MG18-127 RuvC-III domain

SEQ ID NO: 3299 - protein, 136 aa, unidentified; identical to SEQ ID NO: 3197
  REGION 1..136: note = Description of Unknown: uncultivated organism with predicted taxonomy: Phascolarctobacterium
  REGION 1..136: note = MG18-128 RuvC-III domain

SEQ ID NO: 3300 - protein, 136 aa, unidentified; identical to SEQ ID NO: 3197
  REGION 1..136: note = Description of Unknown: uncultivated organism with predicted taxonomy: Phascolarctobacterium succinatutens
  REGION 1..136: note = MG18-129 RuvC-III domain

SEQ ID NO: 3301 - protein, 136 aa, unidentified; identical to SEQ ID NO: 3182
  REGION 1..136: note = Description of Unknown: uncultivated organism with predicted taxonomy: Phascolarctobacterium succinatutens
  REGION 1..136: note = MG18-130 RuvC-III domain

SEQ ID NO: 3302 - protein, 136 aa, unidentified; identical to SEQ ID NO: 3197
  REGION 1..136: note = Description of Unknown: uncultivated organism with predicted taxonomy: Phascolarctobacterium succinatutens
  REGION 1..136: note = MG18-131 RuvC-III domain

SEQ ID NO: 3303 - protein, 136 aa, unidentified; identical to SEQ ID NO: 3197
  REGION 1..136: note = Description of Unknown: uncultivated organism with predicted taxonomy: Phascolarctobacterium succinatutens
  REGION 1..136: note = MG18-132 RuvC-III domain

SEQ ID NO: 3304 - protein, 136 aa, unidentified; identical to SEQ ID NO: 3203
  REGION 1..136: note = Description of Unknown: uncultivated organism with predicted taxonomy: Phascolarctobacterium succinatutens
  REGION 1..136: note = MG18-133 RuvC-III domain

SEQ ID NO: 3305 - protein, 134 aa, unidentified; identical to SEQ ID NO: 3175
  REGION 1..134: note = Description of Unknown: uncultivated organism with predicted taxonomy: Clostridiales
  REGION 1..134: note = MG18-135 RuvC-III domain

SEQ ID NO: 3306 - protein, 134 aa, unidentified; identical to SEQ ID NO: 3175
  REGION 1..134: note = Description of Unknown: uncultivated organism with predicted taxonomy: Clostridiales
  REGION 1..134: note = MG18-136 RuvC-III domain

SEQ ID NO: 3307 - protein, 134 aa, unidentified; identical to SEQ ID NO: 3175
  REGION 1..134: note = Description of Unknown: uncultivated organism with predicted taxonomy: Dorea sp. OM02-2LB
  REGION 1..134: note = MG18-137 RuvC-III domain

SEQ ID NO: 3308 - protein, 136 aa, unidentified; identical to SEQ ID NO: 3197
  REGION 1..136: note = Description of Unknown: uncultivated organism with predicted taxonomy: Phascolarctobacterium
  REGION 1..136: note = MG18-138 RuvC-III domain

SEQ ID NO: 3309 - protein, 136 aa, unidentified; identical to SEQ ID NO: 3197
  REGION 1..136: note = Description of Unknown: uncultivated organism with predicted taxonomy: Phascolarctobacterium succinatutens
  REGION 1..136: note = MG18-139 RuvC-III domain

SEQ ID NO: 3310 - protein, 136 aa, unidentified; identical to SEQ ID NO: 3197
  REGION 1..136: note = Description of Unknown: uncultivated organism with predicted taxonomy: Phascolarctobacterium succinatutens
  REGION 1..136: note = MG18-140 RuvC-III domain

SEQ ID NO: 3311 - protein, 136 aa, unidentified; identical to SEQ ID NO: 3197
  REGION 1..136: note = Description of Unknown: uncultivated organism with predicted taxonomy: Firmicutes
  REGION 1..136: note = MG18-141 RuvC-III domain

SEQ ID NO: 3312 - protein, 136 aa, unidentified; identical to SEQ ID NO: 3197
  REGION 1..136: note = Description of Unknown: uncultivated organism with predicted taxonomy: Clostridium sp. CAG:964
  REGION 1..136: note = MG18-142 RuvC-III domain

SEQ ID NO: 3313 - protein, 134 aa, unidentified; identical to SEQ ID NO: 3175
  REGION 1..134: note = Description of Unknown: uncultivated organism with predicted taxonomy: Clostridiales
  REGION 1..134: note = MG18-143 RuvC-III domain

SEQ ID NO: 3314 - protein, 134 aa, unidentified; identical to SEQ ID NO: 3175
  REGION 1..134: note = Description of Unknown: uncultivated organism with predicted taxonomy: Firmicutes
  REGION 1..134: note = MG18-144 RuvC-III domain

SEQ ID NO: 3315 - protein, 134 aa, unidentified; identical to SEQ ID NO: 3175
  REGION 1..134: note = Description of Unknown: uncultivated organism with predicted taxonomy: Dorea sp. OM02-2LB
  REGION 1..134: note = MG18-145 RuvC-III domain

SEQ ID NO: 3316 - protein, 136 aa, unidentified; identical to SEQ ID NO: 3197
  REGION 1..136: note = Description of Unknown: uncultivated organism with predicted taxonomy: Phascolarctobacterium succinatutens
  REGION 1..136: note = MG18-146 RuvC-III domain

SEQ ID NO: 3317 - protein, 136 aa, unidentified; identical to SEQ ID NO: 3197
  REGION 1..136: note = Description of Unknown: uncultivated organism with predicted taxonomy: Firmicutes
  REGION 1..136: note = MG18-147 RuvC-III domain

SEQ ID NO: 3318 - protein, 136 aa, unidentified
  REGION 1..136: note = Description of Unknown: uncultivated organism with predicted taxonomy: Lactobacillus oryzae
  REGION 1..136: note = MG18-148 RuvC-III domain
VETRQSTKAVAAILKTAYQNSEVVYVKAGNVSDFRQQFKFVKCREVNDLHHAKDAYLNIVVGNCYHVKFTANPLNFITKNQDNRRYSLKPEIFYKFSIKRDGEIAWLGGKDGTITTVTKTMHKNNILFTRQPVEGK

SEQ ID NO: 3319 - protein, 136 aa, unidentified; identical to SEQ ID NO: 3203
  REGION 1..136: note = Description of Unknown: uncultivated organism with predicted taxonomy: Phascolarctobacterium
  REGION 1..136: note = MG18-149 RuvC-III domain

SEQ ID NO: 3320 - protein, 136 aa, unidentified; identical to SEQ ID NO: 3203
  REGION 1..136: note = Description of Unknown: uncultivated organism with predicted taxonomy: Firmicutes
  REGION 1..136: note = MG18-150 RuvC-III domain

SEQ ID NO: 3321 - protein, 136 aa, unidentified; identical to SEQ ID NO: 3224
  REGION 1..136: note = Description of Unknown: uncultivated organism with predicted taxonomy: Phascolarctobacterium
  REGION 1..136: note = MG18-151 RuvC-III domain

SEQ ID NO: 3322 - protein, 136 aa, unidentified; identical to SEQ ID NO: 3203
  REGION 1..136: note = Description of Unknown: uncultivated organism with predicted taxonomy: Phascolarctobacterium succinatutens
  REGION 1..136: note = MG18-152 RuvC-III domain

SEQ ID NO: 3323 - protein, 136 aa, unidentified; identical to SEQ ID NO: 3197
  REGION 1..136: note = Description of Unknown: uncultivated organism with predicted taxonomy: Firmicutes
  REGION 1..136: note = MG18-153 RuvC-III domain

SEQ ID NO: 3324 - protein, 136 aa, unidentified; identical to SEQ ID NO: 3197
  REGION 1..136: note = Description of Unknown: uncultivated organism with predicted taxonomy: Phascolarctobacterium succinatutens
  REGION 1..136: note = MG18-154 RuvC-III domain

SEQ ID NO: 3325 - protein, 136 aa, unidentified; identical to SEQ ID NO: 3182
  REGION 1..136: note = Description of Unknown: uncultivated organism with predicted taxonomy: Phascolarctobacterium succinatutens
  REGION 1..136: note = MG18-155 RuvC-III domain

SEQ ID NO: 3326 - protein, 136 aa, unidentified; identical to SEQ ID NO: 3197
  REGION 1..136: note = Description of Unknown: uncultivated organism with predicted taxonomy: Clostridium sp. CAG:964
  REGION 1..136: note = MG18-156 RuvC-III domain

SEQ ID NO: 3327 - protein, 136 aa, unidentified; identical to SEQ ID NO: 3224
  REGION 1..136: note = Description of Unknown: uncultivated organism with predicted taxonomy: Ruminococcaceae bacterium
  REGION 1..136: note = MG18-157 RuvC-III domain

SEQ ID NO: 3328 - protein, 136 aa, unidentified; identical to SEQ ID NO: 3182
  REGION 1..136: note = Description of Unknown: uncultivated organism with predicted taxonomy: Clostridium sp. CAG:964
  REGION 1..136: note = MG18-158 RuvC-III domain

SEQ ID NO: 3329 - protein, 136 aa, unidentified; identical to SEQ ID NO: 3205
  REGION 1..136: note = Description of Unknown: uncultivated organism with predicted taxonomy: Phascolarctobacterium succinatutens
  REGION 1..136: note = MG18-159 RuvC-III domain

SEQ ID NO: 3330 - protein, 137 aa, unidentified
  REGION 1..137: note = Description of Unknown: uncultivated organism with predicted taxonomy: Clostridiales
  REGION 1..137: note = MG18-160 RuvC-III domain
VETRQSTKAVAEILQQVYPLSKIVYVKAGLVADFRRYMGHVKCREVNDYHHAKDAYLNIVAGNIYHTRFTDNPYNFIKEAKDKDQKYSLKLEKLLTRDIRRGDITAWDTTGNKTRGVVEKVLARNDIRFTRYPYTEK

SEQ ID NO: 3331 - protein, 164 aa, unidentified
  REGION 1..164: note = Description of Unknown: uncultivated organism with predicted taxonomy: Firmicutes
  REGION 1..164: note = MG21-1 RuvC-III domain
QDTQYLSKVIFRLIENHLQFAETAPGKKHTQPVNGAITAQVRKRLGIEKIREDGDLHHAVDAAVIACITPGMIQKITKYAQNHERFYATAKGYVDIETGEVLTRSEYEAMDDIRFPEPWPGFRSELEARVSEHPQEAIARLKLPHYENSEEIRPIFVSRMPNHK

SEQ ID NO: 3332 - protein, 184 aa, unidentified
  REGION 1..184: note = Description of Unknown: uncultivated organism with predicted taxonomy: Roseburia sp. AM23-20
  REGION 1..184: note = MG21-3 RuvC-III domain
TDTQYITKAVADILRNYLAFEEDSPFIKKPVRSINGAVTDQVRKRLGLQKHREEGDLHHAMDAAVIAVTTDGYINRISRYTQRREFGKRIGCYKDKQTGEKVEIERQKGQAPLYIDPETGEKLTEQVFDHKYAPTFPAPWKEFTKELKARMAPNADEAIRQLYLPSYGSEEIKPIFVSQMPDRK

SEQ ID NO: 3333 - protein, 184 aa, unidentified; identical to SEQ ID NO: 3332
  REGION 1..184: note = Description of Unknown: uncultivated organism with predicted taxonomy: Clostridiales
  REGION 1..184: note = MG21-4 RuvC-III domain

SEQ ID NO: 3334 - protein, 184 aa, unidentified; identical to SEQ ID NO: 3332
  REGION 1..184: note = Description of Unknown: uncultivated organism
  REGION 1..184: note = MG21-5 RuvC-III domain

SEQ ID NO: 3335 - protein, 184 aa, unidentified; identical to SEQ ID NO: 3332
  REGION 1..184: note = Description of Unknown: uncultivated organism
  REGION 1..184: note = MG21-6 RuvC-III domain

SEQ ID NO: 3336 - protein, 168 aa, unidentified
  REGION 1..168: note = Description of Unknown: uncultivated organism with predicted taxonomy: Clostridium sp. CAG:571
  REGION 1..168: note = MG21-7 RuvC-III domain
NDTKYICKYMYNLIRNHLEFSDNANFVRKVWTVNGKLTAHIRKRLGIEKVRDGDTHHAVDATVIAITTQNMINRLTRYYQYVDGRYMNNKGEYIDTYTGEIINAKEYEEKYGIYFPEPWPKFRKELDIRTNCKTRERMIECLEAEKIYTYEDYDDVEPIFVSRMPRRK

SEQ ID NO: 3337 - protein, 167 aa, unidentified
  REGION 1..167: note = Description of Unknown: uncultivated organism with predicted taxonomy: Clostridiales
  REGION 1..167: note = MG21-8 RuvC-III domain
NDTQHITRVVYNYLRNNLKFADSAYAKAPVRAVNGAVTAMLRGRWGIEKMRGNGDLHHCKDAVVIAATSDSMIKDLTKYYQEEEQLFMGKTHFVDPATGEVLTRKEFQQRFAPKFPQPWDRFREELEVRLDPTNPKEALMALNLSTYEFDPEEEIPPVFVSHMPKHT

SEQ ID NO: 3338 - protein, 163 aa, unidentified
  REGION 1..163: note = Description of Unknown: uncultivated organism
  REGION 1..163: note = MG21-9 RuvC-III domain
TDTQYITKAVADILRNYLAFEEDSPFIKKPVRSINGAVTDQVRKRLGLQKHREEGDLHHAMDAAVIAVTTDGYINRISRYTQRREFGKRIGCYVDLETGEKLTKQAFEQKYEPTFPAPWNKFTKELKARMAPNADEAIRQLYLPSYGSEEIKPIFVSQMPDRK

SEQ ID NO: 3339 - protein, 168 aa, unidentified
  REGION 1..168: note = Description of Unknown: uncultivated organism with predicted taxonomy: Clostridiales
  REGION 1..168: note = MG21-10 RuvC-III domain
NDTKYICKYMYNLIRNHLEFSDNPNFVRKVWTVNGKLTAHIRKRLGIEKVRDGDTHHAVDATVIAITTQNMINRLTRYYQYVDGRYMNNKGEYIDIYTGEIINAKEYEEKNGIYFPEPWPKFRKELDIRTNCKTRERMIECLEAEKIYTYEDYDDVEPIFVSRMPRRK

SEQ ID NO: 3340 - protein, 168 aa, unidentified
  REGION 1..168: note = Description of Unknown: uncultivated organism with predicted taxonomy: Clostridiales
  REGION 1..168: note = MG21-11 RuvC-III domain
NDTKYICKYMYNLIRNHLEFSDNTNFVRKVWTVNGALTAHIRKRLGIEKVRDGDTHHAVDATVIAITTQGMVNKLTKYYQYVDGRYMNNKGEYIDTYTGEIINAKEYEEKYGIYFPEPWPKFRKELDIRTNCKTRERMIECIEAERIYTYEDYNDVEPIFVSRMPRRK

SEQ ID NO: 3341 - protein, 184 aa, unidentified
  REGION 1..184: note = Description of Unknown: uncultivated organism with predicted taxonomy: Helicobacter sp. MIT 11-5569
  REGION 1..184: note = MG21-12 RuvC-III domain
TDTQYITKAVADILRNYLAFEEDSPFAKKPVRSINGAVTDQVRKRLGLQKHREEGDLHHAMDAAVIAVTTDGYINRISRYTQRREFGKRIGCYKDKQTGEKVEIEKQKGQAPLYVDPETGEKLTEQAFDQKYAPTFPAPWPEFTKELKARMAPNADEAIRQLYLPSYGSEEIKPIFVSQMPDRK

SEQ ID NO: 3342 - protein, 168 aa, unidentified
  REGION 1..168: note = Description of Unknown: uncultivated organism with predicted taxonomy: Clostridium
  REGION 1..168: note = MG21-13 RuvC-III domain
QDTQYMCKLMYNLVRNHLEFSDNKNFERKVWTVNGSVTAHIRKRLGIEKTRDGDTHHAVDAAVIAITTQNMINRITKYYQYNDGKYMNNKGEYIDLETGEILDAKEYEAKNGIYFPEPWPKFRKELDIRVNCNSKERMIECLNAEKIFTYEDYEDVEPIFVSRMPRRK

SEQ ID NO: 3343 - protein, 191 aa, unidentified
  REGION 1..191: note = Description of Unknown: uncultivated organism with predicted taxonomy: Clostridiales
  REGION 1..191: note = MG21-14 RuvC-III domain
EDTQYISRLVYKLINNYMEFSDNPNVNRKVRNINGAVTHYIRNRLGIEKIRADGDEHHAVDACIIATTSNYMVNKITRYSQYIDGRFMNDRGEYIDIETGEIINKEEYEEEYGPKFPEPWEGFRRELEIRSSDDVANRAEKTPEELKNIMIQEINDEIKNGKLYSYIEHDDGINRFDDIEPIFVSRMPRRK

SEQ ID NO: 3344 - protein, 168 aa, unidentified
  REGION 1..168: note = Description of Unknown: uncultivated organism
  REGION 1..168: note = MG21-15 RuvC-III domain
QDTQYICKLMYNLVKNHLEFSNNKNFDRKVWTVNGAITSHIRKRLGIEKTRDGDIHHAIDAVVIAITTQEMINKLTKYYQYKDGKYMNNKGEFIDLETGEILDAEKYEKENGIYFPEPWPKFRKELEIRTICPTKETMISYLHNEKIFTYDDYEDVEPIFVSRMPKRK

SEQ ID NO: 3345 - protein, 184 aa, unidentified
  REGION 1..184: note = Description of Unknown: uncultivated organism
  REGION 1..184: note = MG21-16 RuvC-III domain
TDTQYITKAVADILRNYLAFEEDSPFAKKPVRSINGAVTDQVRKRLGLQKHREEGDLHHAMDAAVIAVTTDGYINRISRYTQRREFGKRIGCYKDKQTGEKVEIEKQKGQAPLYVDPETGEKLTEQAFDQKYAPTFPAPWPEFTKELKARMAPNADEAIRQLYLPSYGSEEIKPIFVSQMPNRK

SEQ ID NO: 3346 - protein, 163 aa, unidentified
  REGION 1..163: note = Description of Unknown: uncultivated organism with predicted taxonomy: Clostridiales
  REGION 1..163: note = MG21-17 RuvC-III domain
KDTQYITRSIYNLLRDNLAFAESRYSKKPVQTVNGAVTSMLRSRWGVQKIREDGDLHHCMDAAVIAATSPGLVQRLTEYSKRREALEEAPRGYVDPSTGELVEQSEQPRRDPFPKPWEQFHQELEARLATVDPRHQIDLLKLATYESDEEVKPVFVSRMPNHK

SEQ ID NO: 3347 - protein, 163 aa, unidentified
  REGION 1..163: note = Description of Unknown: uncultivated organism with predicted taxonomy: Clostridiales bacterium 42_27
  REGION 1..163: note = MG21-18 RuvC-III domain
KDTQYITRSIYNLLRDNLAFAESRYSKKPVQTVNGAVTSMLRSRWGVQKIREDGDLHHCMDAAVIAATSPGLVQRLTEYSKQREAFVKAPAGYVDPSTGGLVEQSEASRRDPFPKPWEQFHQELEARLDPIDPQHQIDLLKLATYESDEEVKPVFVSRMPNHK

SEQ ID NO: 3348 - protein, 180 aa, unidentified
  REGION 1..180: note = Description of Unknown: uncultivated organism
  REGION 1..180: note = MG21-19 RuvC-III domain
VGVQNIQKRIADILRNYLRFYGEMPMEQHIVVTKNSITEAICEQLGLQRYYTKVSALSSALNAILIAVTPANYEAKVTQYVQSREEHYTDDGYIDPENGKKLTIEEFDAKYMPESDLKCIYSYLKEEIEIWMSSASDKKSINAKRGKLEKLHKKLGLKGKYENEINNWKPIFVSQMPDRK

SEQ ID NO: 3349 - protein, 163 aa, unidentified; identical to SEQ ID NO: 3346
  REGION 1..163: note = Description of Unknown: uncultivated organism with predicted taxonomy: Clostridiales
  REGION 1..163: note = MG21-20 RuvC-III domain

SEQ ID NO: 3350 - protein, 168 aa, unidentified
  REGION 1..168: note = Description of Unknown: uncultivated organism with predicted taxonomy: Clostridiales bacterium 42_27
  REGION 1..168: note = MG21-21 RuvC-III domain
NDTKYICKYMYNLIRNHLEFSDNPNFVRKVWTVNGALTAHIRKRLGIEKVRDGDTHHAVDATVIAITTQGMVNKLTKYYQYVDGRYMNNKGEYIDTYTGEIINAKEYEEKYGIYFPEPWPKFRKELDIRTNCKTRERMIECLEAEKVYTYEDYDDVEPIFVSRMPRRK

SEQ ID NO: 3351 - protein, 92 aa, unidentified
  REGION 1..92: note = Description of Unknown: uncultivated organism with predicted taxonomy: Clostridiales
  REGION 1..92: note = MG21-22 RuvC-III domain
KDTQYITRAVYNLIRDHLAFAESNYRKKPVQAVNGAVTAMLRGRWGVQKIREDGDLHHCLDAAVIAATTPGLVQCLTAYNKHRETWERPPAG

SEQ ID NO: 3352 - protein, 167 aa, unidentified
  REGION 1..167: note = Description of Unknown: uncultivated organism with predicted taxonomy: Roseburia inulinivorans
  REGION 1..167: note = MG21-23 RuvC-III domain
NDTQHITRVVYNYLRNNLEFADSAYAKAPVQAVNGAVTAMLRGRWGIEKMRGDGDLHHCKDAVVIAATSDSMIKDLTKYYQEEEQLFMGKTNFVDPATGEVLTRKEFQQRFAPKFPQPWPRFREELEARLDPTNPKEALMALNLSTYEFDPEEEIPPVFVSHMPKHT

SEQ ID NO: 3353 - protein, 157 aa, unidentified
  REGION 1..157: note = Description of Unknown: uncultivated organism with predicted taxonomy: Firmicutes
  REGION 1..157: note = MG21-24 RuvC-III domain
NDTQHITRVVYNYLRNNLEFADSAYAKAPVQAVNGAVTAMLRGRWGIEKMRGDGDLHHCKDAVVIAATSRSMIEDLTKYYQEEEQRFMGKTHFVDPATGEVLTRKEFPQPWPRFREELEARLDPIDPMEAVMALHLSTYEPEEEIAPVFVSHMPKHT

SEQ ID NO: 3354 - protein, 163 aa, unidentified
  REGION 1..163: note = Description of Unknown: uncultivated organism with predicted taxonomy: Clostridiales bacterium 42_27
  REGION 1..163: note = MG21-25 RuvC-III domain
KDTQYITRAVYNLIRDHLAFAESNYRKKPVQAVNGAVTSMLRGRWGVQKIREDGDLHHCLDAAVIATTTPGLVQRLTAYNKHRETWERPPAGYVDPATGELIELPQEARHDPFPKPWERFRQELEARLDPIDPRHQIDLLKLETYESDEEIKPVFVSRMPNHK

SEQ ID NO: 3355 - protein, 163 aa, unidentified
  REGION 1..163: note = Description of Unknown: uncultivated organism with predicted taxonomy: Ruminococcaceae bacterium TF06-43
  REGION 1..163: note = MG21-26 RuvC-III domain
KDTQYITRAVYNLIRDHLAFAESNYRKKPVQAVNGAVTSMLRGRWGVQKIREDGDLHHCLDAAVIATTTPGLVQRLTAYNKHRETWERPPAGYVDPATGELIELPQEARRDPFPKPWERFRQELEARLDPIDPRHQIDLLKLETYESDEEIKPVFVSRMPNHK

SEQ ID NO: 3356 - protein, 166 aa, unidentified
  REGION 1..166: note = Description of Unknown: uncultivated organism with predicted taxonomy: Clostridiales
  REGION 1..166: note = MG21-27 RuvC-III domain
VDTQYIARVIYNLINDHLQFAETGKYDKKRRTQAVNGAITAHVRKRLGIQKIREDGDLHHAVDAAVVACVSPGMIQKVTQYTKHRECIRKTKEGYLDTETGELMTREAYDAKYSPRFPAPWERFRQELEARLSDNPAEEIARLHLATYDSEEEIKPVFVSRKQTHK

SEQ ID NO: 3357 - protein, 163 aa, unidentified
  REGION 1..163: note = Description of Unknown: uncultivated organism with predicted taxonomy: Clostridiales bacterium 42_27
  REGION 1..163: note = MG21-28 RuvC-III domain
KDTQYITRAVYNLIRDHLAFAESNYRKKPVQAVNGAVTAMLRGRWGVQKIREDGDLHHCLDAAVIAATTPGLVQRLTAYNKHRETWERSPAGYVDPATGEMIELPQEARRDPFPKPWERFRQELEARLDPIDPRHQIDLLKLETYESDEEIKPVFVSRMPNHK

SEQ ID NO: 3358 - protein, 163 aa, unidentified
  REGION 1..163: note = Description of Unknown: uncultivated organism with predicted taxonomy: Firmicutes
  REGION 1..163: note = MG21-29 RuvC-III domain
KDTQYITRAIYTLIRDNLVFAESNYKKRPVQTVNGAVTSMLRNRWGVQKIREDGDLHHCLDAAVIAATTPGLVQRLTEHSKRRETLEKAPAGYVDPATGELIELPQEARRDPFPKPWERFRQELEARLDPIDPRHQIDLLKLETYESDEEIKPVFVSRMPNHK

SEQ ID NO: 3359 - protein, 163 aa, unidentified
  REGION 1..163: note = Description of Unknown: uncultivated organism with predicted taxonomy: Clostridiales bacterium 42_27
  REGION 1..163: note = MG21-30 RuvC-III domain
KDTQYITRAVYNLIRDHLAFAESNYRKKPVQAVNGAVTSMLRGRWGVQKIREDGDLHHCLDAAVIAATTPGLVQRLTAYNKHRETWERPPAGYVDPATGELIELPQEARRDPFPKPWERFRQELEARLDPIDPRHQIDLLKLETYESDEEIKPVFVSRMPNHK

SEQ ID NO: 3360 - protein, 159 aa, unidentified
  REGION 1..159: note = Description of Unknown: uncultivated organism
  REGION 1..159: note = MG21-31 RuvC-III domain
NDTQHITRVVYNYLRNNLEFADSAYAKAPVQAVNGAVTAMLRGRWGIEKMRGNGDLHHCKDAVVIAATSDSMIKDLTKYYQEEEQRFMGKTHFVDPATGEVLTRKEFPQPWPRFREELEARLDPTNPKEALMALNLSTYEFDPEEEIPPVFVSHMPKHT

SEQ ID NO: 3361 - protein, 163 aa, unidentified
  REGION 1..163: note = Description of Unknown: uncultivated organism with predicted taxonomy: Ruminococcaceae bacterium TF06-43
  REGION 1..163: note = MG21-32 RuvC-III domain
KDTQYITRSIYNLIRNNLVFAESNYKKRPVQTVNGAVTSMLRNRWGVQKIREDGDLHHCLDAAVIAATTPGLVQRLTEHSKRRETLEKAPASYVDPATGDLLELPQEARRDLFPKPWERFRQELEARLNPIDPRHQIDLLKLSTYESDEEIKPVFVSRMPNHK

SEQ ID NO: 3362 - protein, 166 aa, unidentified
  REGION 1..166: note = Description of Unknown: uncultivated organism with predicted taxonomy: Clostridiales
  REGION 1..166: note = MG21-33 RuvC-III domain
VDTQYIARVIYNLINDHLQFAETGKYDKKRRTQAVNGAITAHVRKRLGIQKIREDGDLHHAVDAAVVACVSPSMIQKITQYTKHRECIRKTKEGYLDTETGELMTREAYDAKYSPRFPAPWERFRQELEARLSDNPAEEIARLHLATYDSEEEIKPVFVSRKQTHK

SEQ ID NO: 3363 - protein, 163 aa, unidentified
  REGION 1..163: note = Description of Unknown: uncultivated organism with predicted taxonomy: Clostridiales
  REGION 1..163: note = MG21-34 RuvC-III domain
KDTQYITRTVYNLIRDHLAFAESAYRKKPVQAVNGAVTSMLRNRWGVQKIREDGDLHHCLDAAVIAATTPGLVQRLTAYSKHRETWERPPAGYVDPATGELIELPQEARRDPFPKPWERFRQELEARLDPIDPRHQIDLLKLETYESDEEIKPVFVSRMPNHK

SEQ ID NO: 3364 - protein, 163 aa, unidentified
  REGION 1..163: note = Description of Unknown: uncultivated organism with predicted taxonomy: Clostridiales
  REGION 1..163: note = MG21-35 RuvC-III domain
KDTQYITRAVYNLIRDHLAFAESNYRKKPVQAVNGAVTAMLRGRWGVQKIREDGDLHHCLDAAVIAATTPGLVQRLTAYNKHRETWERPPAGYVDPATGELIELPQEARRDPFPKPWERFRQELEARLDPIDPRHQIDLLKLETYESDEEIKPVFVSRMPNHK

SEQ ID NO: 3365 - protein, 168 aa, unidentified
  REGION 1..168: note = Description of Unknown: uncultivated organism
  REGION 1..168: note = MG21-36 RuvC-III domain
QDTQYISRLMYNLIKNHVQFSNNENFERKVFTVNGQITSHIRKRLGINKIRENGDEHHAIDAAIIATVSQGMIQRITKYYQYIDGRYEKNSGEYIDIETGEIITKEQYEAENGSNFPEPWPKFRKELDIRTTCKTKARMEECLLTEKIFYDDYDDVKPIFISRMPRRK

SEQ ID NO: 3366 - protein, 163 aa, unidentified
  REGION 1..163: note = Description of Unknown: uncultivated organism with predicted taxonomy: Clostridiales
  REGION 1..163: note = MG21-37 RuvC-III domain
KDTQYITRAVYNLIRDHLAFAESNYRKKPVQAVNGAVTAMLRGRWGVQKIREDGDLHHCLDAAVIAATTPGLVQRLTAYNKHRETWERPPAGYVDPATGELIELPQEARHDQFPKPWERFRQELEARLDPIDPRHQIDLLKLETYESDEEIQPVFVSRMPNHK

SEQ ID NO: 3367 - protein, 163 aa, unidentified; identical to SEQ ID NO: 3357
  REGION 1..163: note = Description of Unknown: uncultivated organism with predicted taxonomy: Clostridiales bacterium 42_27
  REGION 1..163: note = MG21-38 RuvC-III domain

SEQ ID NO: 3368 - protein, 163 aa, unidentified
  REGION 1..163: note = Description of Unknown: uncultivated organism with predicted taxonomy: Clostridiales
  REGION 1..163: note = MG21-39 RuvC-III domain
KDTQYITRSIYNLIRNNLVFAESNYKKRPVQTVNGAVTSMLRNRWGVQKIREDGDLHHCLDAAVIAATTPGLVQRLTEHSKRRETLEKAPAGYVDPATGELLELPQEARRDLFPKPWERFRQELEARLNPIDPRHQIDLLKLSTYESDEEIKPVFVSRMPNHK

SEQ ID NO: 3369 - protein, 163 aa, unidentified
  REGION 1..163: note = Description of Unknown: uncultivated organism with predicted taxonomy: Clostridiales
  REGION 1..163: note = MG21-40 RuvC-III domain
KDTQYITRSIYNLLRDNLAFAESDYRKKPVQTVNGAVTSMLRGRWGVQKIREDGDLHHCMDAAVIAAASPGLVQRLTEYSKRREAFEEVSRGYVDPATGELVELPEQLRRDPFPKPWERFRQELEARLDPIDPQHQIDLLKLATYESDEEIRPVFVSRMPNHK

SEQ ID NO: 3370 - protein, 165 aa, unidentified
  REGION 1..165: note = Description of Unknown: uncultivated organism with predicted taxonomy: Firmicutes
  REGION 1..165: note = MG21-41 RuvC-III domain
NDTQHITRVVYNYLRNNLEFADSAYAKAPVQAVNGAVTAMLRGRWGIEKMRGDGDLHHCKDAVVIAATSRSMVQRLTNYYKEEERLFMGKTHFVDPATGEVLTRKEFQQRFAPKFPQPWDRFREELEARLDPIDPMEAVMALHLSTYEPEEEIAPVFVSHMPKHT

SEQ ID NO: 3371 - protein, 168 aa, unidentified
  REGION 1..168: note = Description of Unknown: uncultivated organism with predicted taxonomy: Clostridiales
  REGION 1..168: note = MG21-42 RuvC-III domain
NDTKYICKYMYNLIRNHLEFSDNANFVRKVWTVNGALTAHIRKRLGIEKVRDGDTHHAVDATVIAITTQGMVNKLTKYYQYVDGRYMNNKGEYIDTYTGEIINAKEYEEKYGIYFPEPWPKFRKELDIRTNCKTRERMIECLESEKIYTYEDYDDVEPIFVSRMPRRK

SEQ ID NO: 3372 - protein, 163 aa, unidentified
  REGION 1..163: note = Description of Unknown: uncultivated organism with predicted taxonomy: Clostridiales bacterium 42_27
  REGION 1..163: note = MG21-43 RuvC-III domain
KDTQYITRAVYNLIRDHLAFAESNYRKKPVQAVNGAVTAMLRGRWGVQKIREDGDLHPCLDAAVIAATTPGLVQRLTAYNKHRETWERSPAGYVDPATGEMLELPQEARRDPFPKPWERFRQELEARLDPIDPRHQIDLLKLETYESDEEIKPVFVSRMPNHK

SEQ ID NO: 3373 - protein, 168 aa, unidentified
  REGION 1..168: note = Description of Unknown: uncultivated organism with predicted taxonomy: Clostridiales
  REGION 1..168: note = MG21-44 RuvC-III domain
QDTQYISRLMYNLIKNHVQFSDNENFDRKVFTVNGQITSHVRKRLGINKIRENGDEHHAVDAAVIAIISQGMIQKITKYYQYIDGRYEKNSGEYIDLETGEILTKEQYEKENGINFPEPWPKFRTELDIRTTCQTKERMEECLVAEKIYYENYDDVKPVFISRMPRRK

SEQ ID NO: 3374 - protein, 163 aa, unidentified; identical to SEQ ID NO: 3359
  REGION 1..163: note = Description of Unknown: uncultivated organism with predicted taxonomy: Clostridiales
  REGION 1..163: note = MG21-45 RuvC-III domain

SEQ ID NO: 3375 - protein, 168 aa, unidentified; identical to SEQ ID NO: 3371
  REGION 1..168: note = Description of Unknown: uncultivated organism with predicted taxonomy: Clostridiales
  REGION 1..168: note = MG21-46 RuvC-III domain

SEQ ID NO: 3376 - protein, 166 aa, unidentified; identical to SEQ ID NO: 3356
  REGION 1..166: note = Description of Unknown: uncultivated organism with predicted taxonomy: Clostridiales
  REGION 1..166: note = MG21-47 RuvC-III domain

SEQ ID NO: 3377 - protein, 163 aa, unidentified; identical to SEQ ID NO: 3366
  REGION 1..163: note = Description of Unknown: uncultivated organism with predicted taxonomy: Clostridiales bacterium 42_27
  REGION 1..163: note = MG21-48 RuvC-III domain

SEQ ID NO: 3378 - protein, 163 aa, unidentified
  REGION 1..163: note = Description of Unknown: uncultivated organism with predicted taxonomy: Clostridiales bacterium 42_27
  REGION 1..163: note = MG21-49 RuvC-III domain
KDTQYITRAVYNLIRDHLAFAESNYRKKPVQAVNGAVTAMLRGRWGVQKIREDGDLHHCLDAAVIAATTPGLVQRLTAYNKHRETWERSPAGYVDPATGEMLELPQEARRDPFPKPWERFRQELEARLDPIDPRHQIDLLKLETYESDEEIKPVFVSRMPNHK

SEQ ID NO: 3379 - protein, 163 aa, unidentified; identical to SEQ ID NO: 3357
  REGION 1..163: note = Description of Unknown: uncultivated organism with predicted taxonomy: Clostridiales bacterium 42_27
  REGION 1..163: note = MG21-50 RuvC-III domain

SEQ ID NO: 3380 - protein, 163 aa, unidentified
  REGION 1..163: note = Description of Unknown: uncultivated organism with predicted taxonomy: Clostridiales bacterium 42_27
  REGION 1..163: note = MG21-51 RuvC-III domain
KDTQYITRAVYNLIREHLVFAESAYRKKPVQTVNGAVTSMLRGRWGVQKIREDGDLHHCLDAAVIAATTPGLVQRLTAYNKRRESWERSPAGYVDPATGELIVLPQEARRDPFPKPWERFRQELEARLDPIDPRHQIDLLKLETYESDEEIKPVFVSRMPNHK

SEQ ID NO: 3381 - protein, 163 aa, unidentified
  REGION 1..163: note = Description of Unknown: uncultivated organism with predicted taxonomy: Clostridiales bacterium 42_27
  REGION 1..163: note = MG21-52 RuvC-III domain
KDTQYITRAVYNLIRDHLAFAESNYRKKPVQAVNGAVTAMLRGRWGVQKIREDGDLHHCLDAAVIAATTPGLVQRLTAYNKHRETWERSPAGYVDPATGEMIELPQEARRDPFPKPWERFRQELEARLDPIDPRHQIDLLKLETYESDEEIQPVFVSRMPNHK

SEQ ID NO: 3382 - protein, 166 aa, unidentified
  REGION 1..166: note = Description of Unknown: uncultivated organism with predicted taxonomy: Clostridiales
  REGION 1..166: note = MG21-53 RuvC-III domain
VDTQYIARVIYNLINDHLQFAETGKYDKKRRTQAVNGAITAHVRKRLGIQKIREDGDLHHAVDAAVVACVSPGMIQKVTQYTKHRECIRKTKEGYLDTETGELMTREAYDAKYSPRFPAPWERFRQELEARLSDNPAEEIARLHLATYDSEEEIKPVFVSRKPERK

SEQ ID NO: 3383 - protein, 163 aa, unidentified
  REGION 1..163: note = Description of Unknown: uncultivated organism with predicted taxonomy: Clostridiales
  REGION 1..163: note = MG21-54 RuvC-III domain
KDTQYITRTVYNLIRDHLAFAESAYRKKPVQAVNGAVTAMLRGRWGVQKIREDGDLHHCLDAAVIAATTPGLVQRLTAYNKHRETWERPPAGYVDPVTGELIELPQEARRDPFPKPWERFRQELEARLDPIDPRHQIDLLKLETYESDEEIKPVFVSRMPNHK

SEQ ID NO: 3384 - protein, 165 aa, unidentified
  REGION 1..165: note = Description of Unknown: uncultivated organism with predicted taxonomy: Ruminococcaceae bacterium TF06-43
  REGION 1..165: note = MG21-55 RuvC-III domain
NDTQHITRVVYNFLRNNLEFADSAYAKAPVQAVNGAVTAMLRGRWGIEKMRGNGDLHHCKDAVVIAATSDSMIEDLTDYYKEEERLFMGKTHFVDPATGEALTRKEFQQRFAPQFPQPWPRFREELEARLDPIDPMEAVMALHLSTYEPDEEIAPVFVSHMPKHT

SEQ ID NO: 3385 - protein, 163 aa, unidentified
  REGION 1..163: note = Description of Unknown: uncultivated organism with predicted taxonomy: Clostridiales bacterium 42_27
  REGION 1..163: note = MG21-56 RuvC-III domain
KDTQYITRAVYNLIRDHLAFAESNYRKKPVQAVNGAVTAMLRGRWGVQKIREDGDLHHCLDAAVIAATTPGLVQRLTAYNKHRETWERSPAGYVDPATGEMIELPQEARRDPFPKPWERFRQELEARLDPIDPRHQIDPLTAETYESDEEIKPVFVSRMPNHK

SEQ ID NO: 3386 - protein, 164 aa, unidentified
  REGION 1..164: note = Description of Unknown: uncultivated organism
  REGION 1..164: note = MG21-57 RuvC-III domain
QDTQYLSKVVFRLIEDHLQFAETAPGKKHTQPVNGAITAQVRKRLGIEKIREDGDLHHAMDAAVIACITPGMIQRITKYAQNHERFYATAKGYADIKTGEVLTRAQYEAMDDIRFPEPWAGFRLELEARVSDHPQEAIAQLKLPHYENSEEIRPIFVSRMPNHK

SEQ ID NO: 3387 - protein, 163 aa, unidentified
  REGION 1..163: note = Description of Unknown: uncultivated organism with predicted taxonomy: Oscillibacter sp. CAG:241_62_21
  REGION 1..163: note = MG21-58 RuvC-III domain
KDTQYITRTIYNLLREHLLFADSRYSKKPVQAVNGAVTAMLRSRWGVHKIREDGDLHHCMDAAVLAATTPGLVQRLTEYSKHRETLIETPAGFVNRLTGELVEEAGDAQRDRFPEPWDRFRQELEARLDPIDPRHQIDRLKLATYESDEELKPVFVSRMPNHK

SEQ ID NO: 3388 - protein, 163 aa, unidentified; identical to SEQ ID NO: 3387
  REGION 1..163: note = Description of Unknown: uncultivated organism with predicted taxonomy: Clostridiales
  REGION 1..163: note = MG21-59 RuvC-III domain

SEQ ID NO: 3389 - protein, 163 aa, unidentified; identical to SEQ ID NO: 3357
  REGION 1..163: note = Description of Unknown: uncultivated organism with predicted taxonomy: Firmicutes
  REGION 1..163: note = MG21-60 RuvC-III domain

SEQ ID NO: 3390 - protein, 163 aa, unidentified; identical to SEQ ID NO: 3363
  REGION 1..163: note = Description of Unknown: uncultivated organism with predicted taxonomy: Clostridiales
  REGION 1..163: note = MG21-61 RuvC-III domain

SEQ ID NO: 3391 - protein, 163 aa, unidentified; identical to SEQ ID NO: 3366
  REGION 1..163: note = Description of Unknown: uncultivated organism with predicted taxonomy: Firmicutes bacterium CAG:129
  REGION 1..163: note = MG21-62 RuvC-III domain

SEQ ID NO: 3392 - protein, 163 aa, unidentified
  REGION 1..163: note = Description of Unknown: uncultivated organism with predicted taxonomy: Clostridiales
  REGION 1..163: note = MG21-63 RuvC-III domain
KDTQYITRSIYNLIRNNLVFAESNYKKRPVQTVNGAVTSMLRNRWGVQKIREDGDLHHCLDAAVIAATTPGLVQRLTEHSKRRETLEKAPAGYVDPATGELLELPQEARRDLFPKPWERFRQELEARLDPIDPRHQIDLLELETYESDEEIKPVFASRMPNHK

SEQ ID NO: 3393 - protein, 163 aa, unidentified
  REGION 1..163: note = Description of Unknown: uncultivated organism with predicted taxonomy: Clostridiales
  REGION 1..163: note = MG21-64 RuvC-III domain
KDTQYITRSIYNLIRNNLVFAESNYKKRPVQTVNGAVTSMLRNRWGVQKIREDGDLHHCLDAAVIAATTPGLVQRLTEHSKRRETLEKAPAGYVDPATGELLELPQEARRDLFPKPWERFRQELEARLDPIDPRHQIDLLKLETYESDEEIKPVFASRMPNHK

SEQ ID NO: 3394 - protein, 160 aa, unidentified
  REGION 1..160: note = Description of Unknown: uncultivated organism with predicted taxonomy: Clostridiales bacterium 42_27
  REGION 1..160: note = MG21-65 RuvC-III domain
VDTQYIARVIYNLINDHLQFAETGKYDKKRRTQAVNGAITAHVRKRLGIQKIREDGDLHHAVDAAVVACVSPGMIQKVTQYTKHRECIRKTKEGYLDTETGELMTREAYDAKYSPRFPAPWERFRQELEARLSDNPAEEIARLHLATYDSEEEIKPVFVS

SEQ ID NO: 3395 - protein, 163 aa, unidentified; identical to SEQ ID NO: 3393
  REGION 1..163: note = Description of Unknown: uncultivated organism with predicted taxonomy: Clostridiales
  REGION 1..163: note = MG21-66 RuvC-III domain

SEQ ID NO: 3396 - protein, 163 aa, unidentified; identical to SEQ ID NO: 3358
  REGION 1..163: note = Description of Unknown: uncultivated organism with predicted taxonomy: Clostridia
  REGION 1..163: note = MG21-67 RuvC-III domain

SEQ ID NO: 3397 - protein, 163 aa, unidentified; identical to SEQ ID NO: 3378
  REGION 1..163: note = Description of Unknown: uncultivated organism with predicted taxonomy: Clostridiales
  REGION 1..163: note = MG21-68 RuvC-III domain

SEQ ID NO: 3398 - protein, 165 aa, unidentified
  REGION 1..165: note = Description of Unknown: uncultivated organism with predicted taxonomy: Firmicutes
  REGION 1..165: note = MG21-69 RuvC-III domain
NDTQHITRVVYNYLRNNLEFADSAYAKAPVRAVNGAVTAMLRGRWGIEKMRGNGDLHHCKDAVVIAATSRSMVQRLTNYYKEEERLFMGKTNFVDPATGEVLTRKEFQQRFAPKFPQPWDRFREELEARLDPIDPMEAVTALYLSTYEPEEEIAPVFVSHMPKHT

SEQ ID NO: 3399 - protein, 167 aa, unidentified
  REGION 1..167: note = Description of Unknown: uncultivated organism with predicted taxonomy: Firmicutes
  REGION 1..167: note = MG21-70 RuvC-III domain
NDTQHITRVVYNYLRNNLEFADSAYAKAPVRAVNGAVTAMLRGRWGIEKMRGDGDLHHCKDAVVIAATSDSMIKDLTKYYQEEEQLFMGKTNFVDPATGEVLTRKEFQQRFAPKFPQPWPRFREELEARLDPTNPKEALMALNLSTYEFDPEEEIPPVFVSHMPKHT

SEQ ID NO: 3400 - protein, 157 aa, unidentified; identical to SEQ ID NO: 3353
  REGION 1..157: note = Description of Unknown: uncultivated organism with predicted taxonomy: Clostridiales
  REGION 1..157: note = MG21-71 RuvC-III domain

SEQ ID NO: 3401 - protein, 167 aa, unidentified; identical to SEQ ID NO: 3352
  REGION 1..167: note = Description of Unknown: uncultivated organism
  REGION 1..167: note = MG21-72 RuvC-III domain

SEQ ID NO: 3402 - protein, 163 aa, unidentified; identical to SEQ ID NO: 3393
  REGION 1..163: note = Description of Unknown: uncultivated organism with predicted taxonomy: Clostridiales
  REGION 1..163: note = MG21-73 RuvC-III domain

SEQ ID NO: 3403 - protein, 165 aa, unidentified
  REGION 1..165: note = Description of Unknown: uncultivated organism with predicted taxonomy: Firmicutes
  REGION 1..165: note = MG21-74 RuvC-III domain
NDTQHITRVVYNYLRNNLSFADSTYANAPVQAVSGTVTATLRGRWGIEKMREDGDLHHCKDAVVIAATSPSMIQRLSNYYKEEERLFMGKTHFVDPETGEVLTRKAFQQRFAPKFPQPWDRFREELEARLDPVNPMDAVMALHLSTYEPDEDITPVFVSHMPKHT

SEQ ID NO: 3404 - protein, 168 aa, unidentified
  REGION 1..168: note = Description of Unknown: uncultivated organism with predicted taxonomy: Clostridiales
  REGION 1..168: note = MG21-75 RuvC-III domain
CDTQYISRLMYNLIKNHVQFSNNENFERKVFTVNGQITSHIRKRLGINKIRENGDEHHAIDAAIIATVSQGMIQRITKYYQYIDGRYEKNSGEYIDIETGEIITKEQYEAENGSNFPEPWPKFRKELDIRTTCKTKARMEECLLTEKIFYDDYDDVKPIFISRMPRRK

SEQ ID NO: 3405 - protein, 163 aa, unidentified; identical to SEQ ID NO: 3378
  REGION 1..163: note = Description of Unknown: uncultivated organism with predicted taxonomy: Clostridiales bacterium 42_27
  REGION 1..163: note = MG21-76 RuvC-III domain

SEQ ID NO: 3406 - protein, 166 aa, unidentified
  REGION 1..166: note = Description of Unknown: uncultivated organism with predicted taxonomy: Clostridiales
  REGION 1..166: note = MG21-77 RuvC-III domain
VDTQYIARVIYNLINDHLQFAETGKYDKKRRTQAVNGAITAHVRKRLGIQKIREDGDLHHAVDAAVVACVSPGMIQKITQYTKHRECIRKTKEGYLDTETGELMTREAYDAKYSPRFPAPWERFRQELEARLSDNPAEEIARLHLATYDSEEEIKQVFVSRKQTHK

SEQ ID NO: 3407 - protein, 163 aa, unidentified; identical to SEQ ID NO: 3378
  REGION 1..163: note = Description of Unknown: uncultivated organism with predicted taxonomy: Clostridiales bacterium 42_27
  REGION 1..163: note = MG21-78 RuvC-III domain

SEQ ID NO: 3408 - protein, 163 aa, unidentified
  REGION 1..163: note = Description of Unknown: uncultivated organism with predicted taxonomy: Clostridiales
  REGION 1..163: note = MG21-79 RuvC-III domain
KDTQYITRTVYNLIRNHLAFAESAYRKKPVQAVNGAVTAMLRGRWGVQKIREDSDLHHCLDAAVIAATTPGLVQRLTAYNKHRETWERPPAGYVDPATGELIELPQEARRDPFPKPWERFRQELEARLDPIDPRHQIDLLKLETYESDEEIKPVFVSRMPNHK

SEQ ID NO: 3409 - protein, 164 aa, unidentified
  REGION 1..164: note = Description of Unknown: uncultivated organism with predicted taxonomy: Clostridiales
  REGION 1..164: note = MG21-80 RuvC-III domain
QDTQYLSKVVFRLIEDHLQFAKTAPGKKHTQPVNGAITAQVRKRLGIEKIREDGDLHHAMDAAVIACITPGMIQRITKYAQNHERFYATAKGYVDIKTGEVLTRAQYEAMDDIRFPEPWAGFRLELEARVSDHPQEAIAQLKLPHYENSEEIRPIFVSRMPNHK

SEQ ID NO: 3410 - protein, 163 aa, unidentified
  REGION 1..163: note = Description of Unknown: uncultivated organism with predicted taxonomy: Clostridiales
  REGION 1..163: note = MG21-81 RuvC-III domain
KDTQYITRSIYNLLRDNLAFAESDYRKKPVQTVNGAVTSMLRGRWGVQKIREDGDLHHCMDAAVIAAASPGLVQRLTEYSKRREAFEEVSRGYVDPATGELVELPEQLRRDPFPKPWERFRQELEARLDPIDPRHQIDLLKLATYESDEKIRPVFVSRMPNHK

SEQ ID NO: 3411 - protein, 163 aa, unidentified; identical to SEQ ID NO: 3378
  REGION 1..163: note = Description of Unknown: uncultivated organism with predicted taxonomy: Clostridiales bacterium 42_27
  REGION 1..163: note = MG21-82 RuvC-III domain

SEQ ID NO: 3412 - protein, 163 aa, unidentified; identical to SEQ ID NO: 3378
  REGION 1..163: note = Description of Unknown: uncultivated organism with predicted taxonomy: Clostridiales bacterium 42_27
  REGION 1..163: note = MG21-83 RuvC-III domain

SEQ ID NO: 3413 - protein, 163 aa, unidentified
  REGION 1..163: note = Description of Unknown: uncultivated organism with predicted taxonomy: Clostridiales
  REGION 1..163: note = MG21-84 RuvC-III domain
KDTQYITRSIYNLIRNNLVFAESNYKKRPVQTVNGAVTSMLRNRWGVQKIREDGDLHHCLDAAVIAATTPGLVQRLTEHSKRRETLEKAPAGYVDPATGELLELPQEARRDLFPKPWERFRQELEARLDPIDPRHQIDLLKLSTYESDEEIKPVFASRMPNHK

SEQ ID NO: 3414 - protein, 166 aa, unidentified
  REGION 1..166: note = Description of Unknown: uncultivated organism with predicted taxonomy: Clostridiales
  REGION 1..166: note = MG21-85 RuvC-III domain
VDTQYIARVIYNLINDHLQFAETGKYDKKRRTQAVNGAITAHVRKRLGIQKIREDGDLHHAADAAVVACVSPSMIQKITQYTKHRECIRETPKGYLDTETGELMTREAYDAKYPPRFPAPWERFRQELEARLSDNPAEEIARLHLATYDSEEEIKPVFVSRKPERK

SEQ ID NO: 3415 - protein, 163 aa, unidentified; identical to SEQ ID NO: 3410
  REGION 1..163: note = Description of Unknown: uncultivated organism with predicted taxonomy: Firmicutes
  REGION 1..163: note = MG21-86 RuvC-III domain

SEQ ID NO: 3416 - protein, 163 aa, unidentified; identical to SEQ ID NO: 3363
  REGION 1..163: note = Description of Unknown: uncultivated organism with predicted taxonomy: Clostridiales
  REGION 1..163: note = MG21-87 RuvC-III domain

SEQ ID NO: 3417 - protein, 166 aa, unidentified
  REGION 1..166: note = Description of Unknown: uncultivated organism with predicted taxonomy: Clostridiales
  REGION 1..166: note = MG21-88 RuvC-III domain
VDTQYIARVIYNLINDHLQFAETGKYDKKRRTQAVNGAITAHVRKRLGIQKIREDGDLHHAVDAAVVACVSPGMIQKITQYTKHRECIRKTKEGYLDTETGELMTREAYDAKYSPRFPAPWERFRQELEARLSDNPAEEIARLHLATYDSEEEIKPVFVSRKQTHK

SEQ ID NO: 3418 - protein, 163 aa, unidentified; identical to SEQ ID NO: 3363
  REGION 1..163: note = Description of Unknown: uncultivated organism with predicted taxonomy: Clostridiales
  REGION 1..163: note = MG21-89 RuvC-III domain

SEQ ID NO: 3419 - protein, 163 aa, unidentified; identical to SEQ ID NO: 3378
  REGION 1..163: note = Description of Unknown: uncultivated organism with predicted taxonomy: Clostridiales bacterium 42_27
  REGION 1..163: note = MG21-90 RuvC-III domain

SEQ ID NO: 3420 - protein, 163 aa, unidentified; identical to SEQ ID NO: 3378
  REGION 1..163: note = Description of Unknown: uncultivated organism with predicted taxonomy: Clostridiales bacterium 42_27
  REGION 1..163: note = MG21-91 RuvC-III domain

SEQ ID NO: 3421 - protein, 163 aa, unidentified
  REGION 1..163: note = Description of Unknown: uncultivated organism with predicted taxonomy: Ruminococcaceae bacterium TF06-43
  REGION 1..163: note = MG21-92 RuvC-III domain
KDTQYITRTVYNLIRDHLAFAESAYRKKPVQAVNGAVTSMLRNRWGVQKIREDGDLHHCLDAAVIAATTPGLVQRLTAYSKHRETWERPPAGYVDPATGELIELPQEARRDPFPKPWERFRQELEARLNPIDPRHQIDLLKLETYESDEEIKPVFASRMPNHK

SEQ ID NO: 3422 - protein, 163 aa, unidentified; identical to SEQ ID NO: 3363
  REGION 1..163: note = Description of Unknown: uncultivated organism with predicted taxonomy: Ruminococcaceae bacterium TF06-43
  REGION 1..163: note = MG21-93 RuvC-III domain

SEQ ID NO: 3423 - protein, 163 aa, unidentified; identical to SEQ ID NO: 3413
  REGION 1..163: note = Description of Unknown: uncultivated organism with predicted taxonomy: Clostridiales
  REGION 1..163: note = MG21-94 RuvC-III domain

SEQ ID NO: 3424 - protein, 163 aa, unidentified; identical to SEQ ID NO: 3357
  REGION 1..163: note = Description of Unknown: uncultivated organism with predicted taxonomy: Clostridiales bacterium 42_27
  REGION 1..163: note = MG21-95 RuvC-III domain

SEQ ID NO: 3425 - protein, 163 aa, unidentified; identical to SEQ ID NO: 3378
  REGION 1..163: note = Description of Unknown: uncultivated organism with predicted taxonomy: Clostridiales bacterium 42_27
  REGION 1..163: note = MG21-96 RuvC-III domain

SEQ ID NO: 3426 - protein, 168 aa, unidentified
  REGION 1..168: note = Description of Unknown: uncultivated organism with predicted taxonomy: Clostridium
  REGION 1..168: note = MG21-97 RuvC-III domain
QDTQYISRLMYNLIKNHVQFSDNENFDRKVFTVNGQITSHVRKRLGINKIRENGDEHHAVDAAVIAIISQGMIQKITKYYQYIDGRYEKNSGEYIDLETGEILTKEQYEKENGINFPEPWPKFRTELDIRTTCQTKERMEECLVAVKIYYENYDDVKPVFISRMPRRK

SEQ ID NO: 3427 - protein, 166 aa, unidentified
  REGION 1..166: note = Description of Unknown: uncultivated organism with predicted taxonomy: Clostridiales
  REGION 1..166: note = MG21-98 RuvC-III domain
VDTQYIARVIYNLINDHLQFAETGKYDKKRRTQAVNGAITAHVRKRLGIQKIREDGDLHHAADAAVVACVSPSMIQKITQYTKHRECIRETPKGYLDTETGELMTREAYDAKYSPRFPAPWERFRQELEARLSDNPAEEIARLHLATYDSEEEIKPVFVSRKPKRK

SEQ ID NO: 3428 - protein, 163 aa, unidentified; identical to SEQ ID NO: 3357
  REGION 1..163: note = Description of Unknown: uncultivated organism with predicted taxonomy: Clostridiales bacterium 42_27
  REGION 1..163: note = MG21-99 RuvC-III domain

SEQ ID NO: 3429 - protein, 163 aa, unidentified; identical to SEQ ID NO: 3363
  REGION 1..163: note = Description of Unknown: uncultivated organism with predicted taxonomy: Clostridiales
  REGION 1..163: note = MG21-100 RuvC-III domain

SEQ ID NO: 3430 - protein, 168 aa, unidentified
  REGION 1..168: note = Description of Unknown: uncultivated organism with predicted taxonomy: Clostridiales
  REGION 1..168: note = MG21-101 RuvC-III domain
QDTQYISRLMYNLIKNHVQFSNNENFERKVFTVNGQITSHIGKRLGINKIRENGDEHHATDAVIIATVSQGMIQRITKYYQYIDGRYEKNSGEYIDMETGEIITKEQYEAKNGSNFPEPWPKFRKELDIRTTCKTKARMEECLLTEKIFYDDYDDVKPIFISRMPKRK

SEQ ID NO: 3431 - protein, 168 aa, unidentified; identical to SEQ ID NO: 3373
  REGION 1..168: note = Description of Unknown: uncultivated organism with predicted taxonomy: Clostridium
  REGION 1..168: note = MG21-102 RuvC-III domain

SEQ ID NO: 3432 - protein, 163 aa, unidentified
  REGION 1..163: note = Description of Unknown: uncultivated organism with predicted taxonomy: Clostridiales
  REGION 1..163: note = MG21-103 RuvC-III domain
KDTQYITRSIYNLIRNNLVFAESNYKKRPVQTVNGAVTSMLRNRWGVQKIREDGDLHHCLDAAVIAATTPGLVQRLTEHSKRRETLEKAPAGYVDPATGELLELPQEARRDLFPKPWERFRQELEARLDPIDPRHQIDLLKLSTYESDEEIKPVFVSRMPNHK

SEQ ID NO: 3433 - protein, 163 aa, unidentified; identical to SEQ ID NO: 3378
  REGION 1..163: note = Description of Unknown: uncultivated organism with predicted taxonomy: Clostridiales bacterium 42_27
  REGION 1..163: note = MG21-104 RuvC-III domain

SEQ ID NO: 3434 - protein, 163 aa, unidentified
  REGION 1..163: note = Description of Unknown: uncultivated organism with predicted taxonomy: Clostridiales bacterium 42_27
  REGION 1..163: note = MG21-105 RuvC-III domain
KDTQYITRAVYNLIRDHLAFAESNYRKKPVQAVNGAVTAMLRGRWGVQKIREDGDLHHCLDAAVIAATTPGLVQRLTAYNKHRETWERSPAGYVDPATGELIELPQEARRDPFPKPWERFRQELEARLDPIDPRHQIDLLKLETYESDEEIKPVFVSRMPNHK

SEQ ID NO: 3435 - protein, 109 aa, unidentified
  REGION 1..109: note = Description of Unknown: uncultivated organism with predicted taxonomy: Oscillibacter sp. CAG:241_62_21
  REGION 1..109: note = MG21-106 RuvC-III domain
KDTQYITRTIYNLLREHLLFADSRYSKKPVQAVNGAVTAMLRSRWGVHKIREDGDLHHCMDAAVLAATTPGLVQRLTEYSKHRETLIETPAGFVNRLTGELVEEAGDAQ

SEQ ID NO: 3436 - protein, 168 aa, unidentified; identical to SEQ ID NO: 3373
  REGION 1..168: note = Description of Unknown: uncultivated organism with predicted taxonomy: Clostridium
  REGION 1..168: note = MG21-107 RuvC-III domain

SEQ ID NO: 3437 - protein, 163 aa, unidentified; identical to SEQ ID NO: 3363
  REGION 1..163: note = Description of Unknown: uncultivated organism with predicted taxonomy: Clostridiales
  REGION 1..163: note = MG21-108 RuvC-III domain

SEQ ID NO: 3438 - protein, 163 aa, unidentified; identical to SEQ ID NO: 3357
  REGION 1..163: note = Description of Unknown: uncultivated organism with predicted taxonomy: Clostridiales bacterium 42_27
  REGION 1..163: note = MG21-109 RuvC-III domain

SEQ ID NO: 3439 - protein, 163 aa, unidentified; identical to SEQ ID NO: 3387
  REGION 1..163: note = Description of Unknown: uncultivated organism with predicted taxonomy: Oscillibacter sp. CAG:241_62_21
  REGION 1..163: note = MG21-110 RuvC-III domain

SEQ ID NO: 3440 - protein, 163 aa, unidentified; identical to SEQ ID NO: 3432
  REGION 1..163: note = Description of Unknown: uncultivated organism with predicted taxonomy: Clostridiales
  REGION 1..163: note = MG21-111 RuvC-III domain

SEQ ID NO: 3441 - protein, 163 aa, unidentified; identical to SEQ ID NO: 3357
  REGION 1..163: note = Description of Unknown: uncultivated organism with predicted taxonomy: Clostridiales bacterium 42_27
  REGION 1..163: note = MG21-112 RuvC-III domain

SEQ ID NO: 3442 - protein, 163 aa, unidentified; identical to SEQ ID NO: 3378
  REGION 1..163: note = Description of Unknown: uncultivated organism with predicted taxonomy: Clostridiales bacterium 42_27
  REGION 1..163: note = MG21-113 RuvC-III domain

SEQ ID NO: 3443 - protein, 163 aa, unidentified
  REGION 1..163: note = Description of Unknown: uncultivated organism with predicted taxonomy: Clostridiales bacterium 42_27
  REGION 1..163: note = MG21-114 RuvC-III domain
KDTQYITRAVYNLIRDHLTFAESNYRKKPVQAVNGAVTAMLRGRWGVQKIREDGDLHHCLDAAVIAATTPGLVQRLTAYNKHRETWERPPAGYVDPATGELIELPQEARRDPFPKPWERFRQELEARLDPIDPRHQIDLLKLETYESDEEIKPVFVSRMPNHK

SEQ ID NO: 3444 - protein, 166 aa, unidentified; identical to SEQ ID NO: 3406
  REGION 1..166: note = Description of Unknown: uncultivated organism with predicted taxonomy: Clostridiales
  REGION 1..166: note = MG21-115 RuvC-III domain

SEQ ID NO: 3445 - protein, 163 aa, unidentified; identical to SEQ ID NO: 3363
  REGION 1..163: note = Description of Unknown: uncultivated organism with predicted taxonomy: Clostridiales
  REGION 1..163: note = MG21-116 RuvC-III domain

SEQ ID NO: 3446 - protein, 163 aa, unidentified; identical to SEQ ID NO: 3357
  REGION 1..163: note = Description of Unknown: uncultivated organism with predicted taxonomy: Clostridiales bacterium 42_27
  REGION 1..163: note = MG21-117 RuvC-III domain

SEQ ID NO: 3447 - protein, 163 aa, unidentified; identical to SEQ ID NO: 3359
  REGION 1..163: note = Description of Unknown: uncultivated organism with predicted taxonomy: Clostridiales bacterium 42_27
  REGION 1..163: note = MG21-118 RuvC-III domain

SEQ ID NO: 3448 - protein, 163 aa, unidentified; identical to SEQ ID NO: 3378
  REGION 1..163: note = Description of Unknown: uncultivated organism with predicted taxonomy: Clostridiales bacterium 42_27
  REGION 1..163: note = MG21-119 RuvC-III domain

SEQ ID NO: 3449 - protein, 163 aa, unidentified; identical to SEQ ID NO: 3363
  REGION 1..163: note = Description of Unknown: uncultivated organism with predicted taxonomy: Ruminococcaceae bacterium TF06-43
  REGION 1..163: note = MG21-120 RuvC-III domain

SEQ ID NO: 3450 - protein, 163 aa, unidentified; identical to SEQ ID NO: 3432
  REGION 1..163: note = Description of Unknown: uncultivated organism with predicted taxonomy: Clostridiales
  REGION 1..163: note = MG21-121 RuvC-III domain

SEQ ID NO: 3451 - protein, 165 aa, unidentified; identical to SEQ ID NO: 3398
  REGION 1..165: note = Description of Unknown: uncultivated organism
  REGION 1..165: note = MG21-122 RuvC-III domain

SEQ ID NO: 3452 - protein, 163 aa, unidentified; identical to SEQ ID NO: 3357
  REGION 1..163: note = Description of Unknown: uncultivated organism with predicted taxonomy: Clostridiales
  REGION 1..163: note = MG21-123 RuvC-III domain

SEQ ID NO: 3453 - protein, 163 aa, unidentified; identical to SEQ ID NO: 3357
  REGION 1..163: note = Description of Unknown: uncultivated organism with predicted taxonomy: Clostridiales bacterium 42_27
  REGION 1..163: note = MG21-124 RuvC-III domain

SEQ ID NO: 3454 - protein, 163 aa, unidentified; identical to SEQ ID NO: 3357
  REGION 1..163: note = Description of Unknown: uncultivated organism with predicted taxonomy: Clostridiales bacterium 42_27
  REGION 1..163: note = MG21-125 RuvC-III domain

SEQ ID NO: 3455 - protein, 95 aa, unidentified
  REGION 1..95: note = Description of Unknown: uncultivated organism with predicted taxonomy: Clostridiales bacterium 42_27
  REGION 1..95: note = MG21-126 RuvC-III domain
KDTQYITRAVYNLIRDHLAFAESNYRKKPVQAVNGAVAAMLRGRWGVQKIREDGDLHHCLDAAVIAATTPGLVQRLTAYNKHRETWERSPAGYVD

SEQ ID NO: 3456 - protein, 163 aa, unidentified
  REGION 1..163: note = Description of Unknown: uncultivated organism with predicted taxonomy: Clostridiales bacterium 42_27
  REGION 1..163: note = MG21-127 RuvC-III domain
KDTQYITRAVYNLIRDHLAFAESNYRKKPVQAVNGAVTAMLRGRWGVQKIREDGDLHHCLDAAVIAATTPGLVQRLTAYNKHRETWERSPAGYVDPATGELIELPQEARRDPFPKPWERFRQELEARLNPIDPRHQIDLLKLETYESDEEIKPVFVSRMPNHK

SEQ ID NO: 3457 - protein, 163 aa, unidentified; identical to SEQ ID NO: 3378
  REGION 1..163: note = Description of Unknown: uncultivated organism with predicted taxonomy: Clostridiales bacterium 42_27
  REGION 1..163: note = MG21-128 RuvC-III domain

SEQ ID NO: 3458 - protein, 163 aa, unidentified; identical to SEQ ID NO: 3434
  REGION 1..163: note = Description of Unknown: uncultivated organism with predicted taxonomy: Clostridiales bacterium 42_27
  REGION 1..163: note = MG21-129 RuvC-III domain

SEQ ID NO: 3459 - protein, 163 aa, unidentified; identical to SEQ ID NO: 3378
  REGION 1..163: note = Description of Unknown: uncultivated organism with predicted taxonomy: Clostridiales bacterium 42_27
  REGION 1..163: note = MG21-130 RuvC-III domain

SEQ ID NO: 3460 - protein, 163 aa, unidentified; identical to SEQ ID NO: 3378
  REGION 1..163: note = Description of Unknown: uncultivated organism with predicted taxonomy: Clostridiales bacterium 42_27
  REGION 1..163: note = MG21-131 RuvC-III domain

SEQ ID NO: 3461 - protein, 163 aa, unidentified; identical to SEQ ID NO: 3378
  REGION 1..163: note = Description of Unknown: uncultivated organism with predicted taxonomy: Clostridiales bacterium 42_27
  REGION 1..163: note = MG21-132 RuvC-III domain

SEQ ID NO: 3462 - protein, 163 aa, unidentified; identical to SEQ ID NO: 3387
  REGION 1..163: note = Description of Unknown: uncultivated organism with predicted taxonomy: Clostridiales
  REGION 1..163: note = MG21-133 RuvC-III domain

SEQ ID NO: 3463 - protein, 163 aa, unidentified; identical to SEQ ID NO: 3378
  REGION 1..163: note = Description of Unknown: uncultivated organism with predicted taxonomy: Clostridiales bacterium 42_27
  REGION 1..163: note = MG21-134 RuvC-III domain

SEQ ID NO: 3464 - protein, 163 aa, unidentified; identical to SEQ ID NO: 3357
  REGION 1..163: note = Description of Unknown: uncultivated organism with predicted taxonomy: Clostridiales
  REGION 1..163: note = MG21-135 RuvC-III domain

SEQ ID NO: 3465 - protein, 167 aa, unidentified; identical to SEQ ID NO: 3337
  REGION 1..167: note = Description of Unknown: uncultivated organism with predicted taxonomy: Clostridiales
  REGION 1..167: note = MG21-136 RuvC-III domain

SEQ ID NO: 3466 - protein, 168 aa, unidentified
  REGION 1..168: note = Description of Unknown: uncultivated organism with predicted taxonomy: Clostridiales
  REGION 1..168: note = MG21-137 RuvC-III domain
QDTQYISRLMYNLIKDHVQFSNNENFERKVFTVNGQITSHIRKRLGINKIRENGDEHHAIDAAIIATVSQGMIQRITKYYQYIDGRYEKNSGEYIDIETGEIITKEQYEAENGSNFPEPWPKFRKELDIRTTCKTKARMEECLLTEKIFYDDYDDVKPIFISRMPRRK

SEQ ID NO: 3467 - protein, 163 aa, unidentified; identical to SEQ ID NO: 3357
  REGION 1..163: note = Description of Unknown: uncultivated organism with predicted taxonomy: Clostridiales bacterium 42_27
  REGION 1..163: note = MG21-138 RuvC-III domain

SEQ ID NO: 3468 - protein, 163 aa, unidentified; identical to SEQ ID NO: 3357
  REGION 1..163: note = Description of Unknown: uncultivated organism with predicted taxonomy: Clostridiales
  REGION 1..163: note = MG21-139 RuvC-III domain

SEQ ID NO: 3469 - protein, 163 aa, unidentified; identical to SEQ ID NO: 3378
  REGION 1..163: note = Description of Unknown: uncultivated organism with predicted taxonomy: Clostridiales bacterium 42_27
  REGION 1..163: note = MG21-140 RuvC-III domain

SEQ ID NO: 3470 - protein, 165 aa, unidentified
  REGION 1..165: note = Description of Unknown: uncultivated organism with predicted taxonomy: Firmicutes
  REGION 1..165: note = MG21-141 RuvC-III domain
NDTQHITRVVYNYLRNNLEFADSAYAKAPVQAVNGAVTAMLRGRWGIEKMRGDGDLHHCKDAVVIAATSPSMIQRLSNYYKEEERLFMGKTHFVDPGTGEVLTRKEFQQRFAPQFPQPWPRFREELEARLDPVNPTEALMALHLSTYEPEEEIKPVFVSHMPKRT

SEQ ID NO: 3471 - protein, 163 aa, unidentified; identical to SEQ ID NO: 3357
  REGION 1..163: note = Description of Unknown: uncultivated organism with predicted taxonomy: Clostridiales bacterium 42_27
  REGION 1..163: note = MG21-142 RuvC-III domain

SEQ ID NO: 3472 - protein, 163 aa, unidentified; identical to SEQ ID NO: 3434
  REGION 1..163: note = Description of Unknown: uncultivated organism with predicted taxonomy: Clostridiales bacterium 42_27
  REGION 1..163: note = MG21-143 RuvC-III domain

SEQ ID NO: 3473 - protein, 166 aa, unidentified; identical to SEQ ID NO: 3406
  REGION 1..166: note = Description of Unknown: uncultivated organism with predicted taxonomy: Clostridiales
  REGION 1..166: note = MG21-144 RuvC-III domain

SEQ ID NO: 3474 - protein, 163 aa, unidentified
  REGION 1..163: note = Description of Unknown: uncultivated organism with predicted taxonomy: Clostridiales
  REGION 1..163: note = MG21-145 RuvC-III domain
VDTQYLSRVIFRLIDENMAFAETGNYKRKTQTVSGAITAQVRKRLGIDKIRENGDLHHAADAAVIACISPGMVHKVTNYAKRCELYRDGQGYIDYETGEVMTKEAFDEKYAPRFPEPWPMFRKELEARLSADPRAEIEHLNLPAYDSSDELRPVFVSRMPRHK

SEQ ID NO: 3475 - protein, 186 aa, unidentified
  REGION 1..186: note = Description of Unknown: uncultivated organism with predicted taxonomy: Bacteroidales
  REGION 1..186: note = MG22-1 RuvC-III domain
NDTRYIARFMKGILSNIVREKNAEGTLEPEETSKNLIVCSGRITDRVKQDWGLNDIWNHIITPRFERLNKKTSSNDFGEYVCKEGKRYFQTRVPLNLQKGFNKKRIDHRHHAMDAIAIACINRSIVNYLNNAAANQTEREDLRRAVCIPERNGQTKRQLRSPWHCFARDAENALRQIVVSFKQNLR

SEQ ID NO: 3476 - protein, 186 aa, unidentified
  REGION 1..186: note = Description of Unknown: uncultivated organism with predicted taxonomy: Bacteroidales
  REGION 1..186: note = MG22-3 RuvC-III domain
SDTRYIARYIKGILSNIVRQRAADGTLEQEATSKNLIVCTGQITDRVKQDWGLNDVWNHIITPRFERLNRMTGSNDYGEWCCKEGKRYFQTRVPLHLQIGFNKKRIDHRHHAMDAIAIACVNRNVVNYLNNAAAHATDRMDLRMRICRPSGNGQTKKEIRSPWKNFAHDAECALQAITVSFKQNVR

SEQ ID NO: 3477 - protein, 186 aa, unidentified; identical to SEQ ID NO: 3476
  REGION 1..186: note = Description of Unknown: uncultivated organism with predicted taxonomy: Bacteroidales
  REGION 1..186: note = MG22-4 RuvC-III domain

SEQ ID NO: 3478 - protein, 186 aa, unidentified
  REGION 1..186: note = Description of Unknown: uncultivated organism with predicted taxonomy: Bacteroidales
  REGION 1..186: note = MG22-5 RuvC-III domain
NDTRYIARFMKGILSNIVREKNADGTLEPEETSKNLIVCSGRITDRVKQDWGLNDIWNHIITPRFERLNTKTSSNDFGEYVCKDGKRYFQTRVPLNLQKGFNKKRIDHRHHAMDAIAIACVNRSIVNYLNNAAANQTEREDLRRAVCIPERNGQTKRQLRSPWHCFARDAENALRQIVVSFKQNLR

SEQ ID NO: 3479 - protein, 186 aa, unidentified
  REGION 1..186: note = Description of Unknown: uncultivated organism with predicted taxonomy: Bacteroidales
  REGION 1..186: note = MG22-6 RuvC-III domain
NDTRYIARFMKGILSNIVRKKNADGTLEPEETSKNLIVCSGRITDRVKQDWGLNDIWNHIITPRFERLNKKTSSNDFGEYVCKDGKRYFQTRVPLNLQKGFNKKRIDHRHHAMDAIAIACVNRSIVNYLNNAAANQTEREDLRRAVCIPERNGQTKRQLRSPWHCFARDAENALRQIVVSFKQNLR

SEQ ID NO: 3480 - protein, 186 aa, unidentified; identical to SEQ ID NO: 3478
  REGION 1..186: note = Description of Unknown: uncultivated organism with predicted taxonomy: Prevotella
  REGION 1..186: note = MG22-7 RuvC-III domain

SEQ ID NO: 3481 - protein, 186 aa, unidentified; identical to SEQ ID NO: 3479
  REGION 1..186: note = Description of Unknown: uncultivated organism with predicted taxonomy: Bacteroidales
  REGION 1..186: note = MG22-8 RuvC-III domain

SEQ ID NO: 3482 - protein, 186 aa, unidentified
  REGION 1..186: note = Description of Unknown: uncultivated organism with predicted taxonomy: Bacteroidales
  REGION 1..186: note = MG22-9 RuvC-III domain
NDTRYIARFMKGFLSNIVREKNADGTLELEETSKNLIVCSGRITDRIKQDWGLNDVWNHIITPRFERLNQKTSSDNFGEYVCKEGKRYFQTRVPLNLQKGFNKKRIDHRHHAMDAIAIACVNRSIVNYLNNAAANQTEREDLRRAVCIPERNGQTKRQLRSPWRNFAKDAENALRQIVVSFKQNLR

SEQ ID NO: 3483 - protein, 186 aa, unidentified
  REGION 1..186: note = Description of Unknown: uncultivated organism with predicted taxonomy: Bacteroidales
  REGION 1..186: note = MG22-10 RuvC-III domain
NDTRYIARFMKGILSNIVREKNADGTLEPEETSKNLIVCSGRITDRVKQDWGLNDIWNHIITPRFERLNTKTSSNDFGEYVCKEGKRYFQTRVPLNLQKGFNKKRIDHRHHAMDAIAIACVNRSIVNYLNNAAANQTEREDLRRAVCIPERNGQTKRQLRSPWHCFARDAENALRQIVVSFKQNLR

SEQ ID NO: 3484 - protein, 89 aa, unidentified
  REGION 1..89: note = Description of Unknown: uncultivated organism with predicted taxonomy: Prevotella sp. MGM2
  REGION 1..89: note = MG22-12 RuvC-III domain
NDTRYIARFMKGILSNIVREKNADGTLEPEETSKNLIVCSGRITDRVKQDWGLNDIWNHIITPRFERLNTKTSSDKFGEYVCKEGKRYF

SEQ ID NO: 3485 - protein, 186 aa, unidentified
  REGION 1..186: note = Description of Unknown: uncultivated organism with predicted taxonomy: Prevotella
  REGION 1..186: note = MG22-13 RuvC-III domain
NDTRYIARFMKGILSNIVREKNADGTLEPEETSKNLIVCSGRITDRVKQDWGLNDIWNHIITPRFERLNKKTSSNDFGEYVCKEGKRYFQTRVPLSLQKGFNKKRIDHRHHAMDAIAIACVNRSIVNYLNNAAANQTEREDLRRAVCIPERNGQTKRQLRSPWLCFARDTENALRQIVVSFKQNLR

SEQ ID NO: 3486 - protein, 186 aa, unidentified; identical to SEQ ID NO: 3478
  REGION 1..186: note = Description of Unknown: uncultivated organism with predicted taxonomy: Prevotella sp. MGM2
  REGION 1..186: note = MG22-15 RuvC-III domain

SEQ ID NO: 3487 - protein, 186 aa, unidentified
  REGION 1..186: note = Description of Unknown: uncultivated organism with predicted taxonomy: Prevotella sp. MGM2
  REGION 1..186: note = MG22-16 RuvC-III domain
NDTRYIARFMKGILSNIVREKNADGTLEPEETSKNLIVCSGRITDRVKQDWGLNDIWSHIVTPRFERLNTKTSSNDFGEYVCKDGKRYFQTRVPLNLQKGFNKKRIDHRHHAMDAIAIACVNRSIVNYLNNAAANQTEREDLRRAVCIPERNGQTKRQLRSPWHCFAREAENALRQIVVSFKQNLR

SEQ ID NO: 3488 - protein, 186 aa, unidentified
  REGION 1..186: note = Description of Unknown: uncultivated organism with predicted taxonomy: Prevotella
  REGION 1..186: note = MG22-17 RuvC-III domain
NDTRYIARFMKGILSNIVREKNTDGILEPEETSKNLIVCSGRITDRVKQDWGLNDIWNHIVTPRFERLNTKTSSNDFGEYVCKDGKRYFQTRVPLNLQKGFNKKRIDHRHHAMDAIAIACVNRSIVNYLNNAAANQTEREDLRRAVCIPERNGQTKRQLRSPWHCFARDAENALRQIVVSFKQNLR

SEQ ID NO: 3489 - protein, 186 aa, unidentified; identical to SEQ ID NO: 3487
  REGION 1..186: note = Description of Unknown: uncultivated organism with predicted taxonomy: Bacteroidales
  REGION 1..186: note = MG22-18 RuvC-III domain

SEQ ID NO: 3490 - protein, 186 aa, unidentified
  REGION 1..186: note = Description of Unknown: uncultivated organism with predicted taxonomy: Prevotella
  REGION 1..186: note = MG22-19 RuvC-III domain
NDTRYIARFMKGILSNIVREKNADGTLEPEETSKNLIVCSGRITDRVKQDWGLNDIWNHIITPRFERLNKKTSSNDFGEYVCKEGKRYFQTRVPLNLQKGFNKKRIDHRHHAMDAIAIACVNRSIVNYLNNAAANQTEREDLRRAVCIPERNGQTKRQLRSPWPCFARDAENALRQIVVSFKQNLR

SEQ ID NO: 3491 - protein, 186 aa, unidentified
  REGION 1..186: note = Description of Unknown: uncultivated organism with predicted taxonomy: Bacteroidales
  REGION 1..186: note = MG22-21 RuvC-III domain
NDTRYIARFMKGILSNIVREKNADGTLEPEETSKNLIVCSGRITDRVKQDWGLNDIWNHIITPRFERLNKKTSSNDFGEYVCKDGKRYFQTRVPLNLQKGFNKKRIDHRHHAMDAIAIACVNRSIVNYLNNAAANQTEREDLRRAVCIPERNGQTKRQLRSPWHCFARDAENALRQIVVSFKQNLR

SEQ ID NO: 3492 - protein, 186 aa, unidentified
  REGION 1..186: note = Description of Unknown: uncultivated organism with predicted taxonomy: Bacteroidales
  REGION 1..186: note = MG22-22 RuvC-III domain
NDTRYIARFMKGILSNIVREKNADGTLEPEETSKNLIVCSGRITDRVKQDWGLNDIWNHIITPRFERLNKKTSSNDFGEYVCKDGKRYFQTRVPLNLQKGFNKKRIDHRHHAMDAIAIACVNRSIVNYLNNAAANQTEREDLRRAVCIPERNGQTKRQLRSPWPCFARDAENALQQIVVSFKQNLR

SEQ ID NO: 3493 - protein, 185 aa, unidentified
  REGION 1..185: note = Description of Unknown: uncultivated organism with predicted taxonomy: Bacteroidales
  REGION 1..185: note = MG22-23 RuvC-III domain
TDTRYIARFMMGVLSNIVRQNDNGVLESEAISKNLIVCNGKITDRVKQDWGLNDVWNHIVTPRFKRLNQITNSSDFGEWCNKEGKRYFQTRIPLELQKGANKKRIDHRHHAMDAIAIACTTRSLVNYLNNQSAHTKAREDYRQRLCRTDGHGQTKRLLRAPWKDFAKDAESALQQIVVSFKQNTR

SEQ ID NO: 3494 - protein, 186 aa, unidentified
  REGION 1..186: note = Description of Unknown: uncultivated organism with predicted taxonomy: Bacteroidales
  REGION 1..186: note = MG22-24 RuvC-III domain
NDTRYIARFMKGILSNIVREKNADGTLEPEETSKNLIVCSGRITDRVKQDWGLNDIWNHIITSRFERLNTKTSSNDFGEYVCKEGKRYFQTRVPLNLQKGFNKKRIDHRHHAMDAIAIACVNRSIVNYLNNAAANQTEREDLRRAVCIPERNGQTKRQLRSPWHCFARDAENALRQIVVSFKQNLR

SEQ ID NO: 3495 - protein, 186 aa, unidentified
  REGION 1..186: note = Description of Unknown: uncultivated organism with predicted taxonomy: Prevotella sp. MGM2
  REGION 1..186: note = MG22-25 RuvC-III domain
NDTRYIARFMKGILSNIVREKNADGTLEPEETSKNLIVCSGRITDRVKQDWGLNDIWNHIITPRFERLNTKTSSNDFGEYVCKDGKRYFQTRVPLNLQKGFNKKRIDHRHHAMDAIAIACVNRSIVNYLNNAAANPTEREDLRRAVCIPERNGQTKRQLRSPWHCFARDAENALRQIVVSFKQNLR

SEQ ID NO: 3496 - protein, 186 aa, unidentified
  REGION 1..186: note = Description of Unknown: uncultivated organism with predicted taxonomy: Bacteroidales
  REGION 1..186: note = MG22-26 RuvC-III domain
NDTRYIARFMKGILSNIVREKNADGTLEPEETSKNLIVCSGRITDRVKQDWGLNDIWNHIITPRFERLNKKTSSNDFGEYVCKEGKRYFQTRVPLNLQKGFNKKRIDHRHHAMDAIAIACINRSIVNYLNNAAANQTEREDLRRAVCIPERNGQTKRQLRSPWHCFARDAENALRQIVVSFKQNLR

SEQ ID NO: 3497 - protein, 186 aa, unidentified
  REGION 1..186: note = Description of Unknown: uncultivated organism with predicted taxonomy: Prevotella sp. MGM2
  REGION 1..186: note = MG22-27 RuvC-III domain
NDTRYIARFMKGILSNIVREKNADGTLEPEETSKNLIVCSGRITDRVKQDWGLNDIWNHIITPRFERLNTKTSSDKFGEYVCKEGKRYFQTRVPLSLQKGFNKKRIDHRHHAMDAIAIACVNRSIVNYLNNAAANQTEREDLRRAVCIPGRNGQTKRQLRSPWHCFARDAENALRQIVVSFKQNLR

SEQ ID NO: 3498 - protein, 186 aa, unidentified; identical to SEQ ID NO: 3478
  REGION 1..186: note = Description of Unknown: uncultivated organism with predicted taxonomy: Bacteroidales
  REGION 1..186: note = MG22-28 RuvC-III domain

SEQ ID NO: 3499 - protein, 186 aa, unidentified
  REGION 1..186: note = Description of Unknown: uncultivated organism with predicted taxonomy: Bacteroidales
  REGION 1..186: note = MG22-29 RuvC-III domain
NDTRYIARFMKGILSNIVREKNADGTLEPEETSKNLIVCSGRITDRVKQDWGLNDIWNHIITPRFERLNTKTSSDKFGEYVCKEGKRYFQTRVPLSLQKGFNKKRIDHRHHAMDAIAIACVNRSIVNYLNNAAANQTEREDLRRAVCIPERNGQTKRQLRSPWHCFARDAENALRQIVVSFKQNLR

SEQ ID NO: 3500 - protein, 186 aa, unidentified
  REGION 1..186: note = Description of Unknown: uncultivated organism with predicted taxonomy: Prevotella sp. MGM2
  REGION 1..186: note = MG22-30 RuvC-III domain
NDTRYIARFMKGILSNIVREKNADGTLEPEETSKNLIVCSGRITDRVKQDWGLNDIWNHIITPRFERLNKKTSSNDFGEYVCKEGKRYFQTRVPLNLQKGFNKKRIDHRHHAMDAIAIACVNRSIVNYLNNAAANQTEREDLRRAVCIPERNGQTKRQLRSPWHCFARDAENALRQIIVSFKQNLR

SEQ ID NO: 3501 - protein, 186 aa, unidentified; identical to SEQ ID NO: 3478
  REGION 1..186: note = Description of Unknown: uncultivated organism with predicted taxonomy: Bacteroidales
  REGION 1..186: note = MG22-31 RuvC-III domain

SEQ ID NO: 3502 - protein, 186 aa, unidentified; identical to SEQ ID NO: 3478
  REGION 1..186: note = Description of Unknown: uncultivated organism with predicted taxonomy: Bacteroidales
  REGION 1..186: note = MG22-33 RuvC-III domain

SEQ ID NO: 3503 - protein, 185 aa, unidentified
  REGION 1..185: note = Description of Unknown: uncultivated organism with predicted taxonomy: Bacteroidales
  REGION 1..185: note = MG22-34 RuvC-III domain
TDTRYIARFMMGVLSNIVRQNDNGVLESEAISKNLIVCNGKITDRVKQDWGLNDVWNHIVTPRFKRLNQITNSSDFGEWCNKEGKRYFQTRIPLELQKGVNKKRIDHRHHAMDAIAIACTTRSLVNYLNNQSAHTKAREDYRQRLCRTDGHGQTKRLLRAPWKDFAKDAESALQQIVVSFKQNTR

SEQ ID NO: 3504 - protein, 185 aa, unidentified; identical to SEQ ID NO: 3503
  REGION 1..185: note = Description of Unknown: uncultivated organism with predicted taxonomy: Parabacteroides sp. An277
  REGION 1..185: note = MG22-35 RuvC-III domain

SEQ ID NO: 3505 - protein, 185 aa, unidentified; identical to SEQ ID NO: 3493
  REGION 1..185: note = Description of Unknown: uncultivated organism with predicted taxonomy: Bacteroidales
  REGION 1..185: note = MG22-36 RuvC-III domain

SEQ ID NO: 3506 - protein, 186 aa, unidentified
  REGION 1..186: note = Description of Unknown: uncultivated organism with predicted taxonomy: Bacteroidales
  REGION 1..186: note = MG22-37 RuvC-III domain
NDTRYIARFMKGILSNIVREKNADGTLEPEETSKNLIVCSGRITDRVKQDWGLNDIWNHIITPRFERLNTKTSSNDFGEYVCKDGKRYFQTRVPLNLQKGFNKKRIDHRHHAMDAIAIACVNRSIVNYLNNAAANQTEREDLRRAVCIPERNGQTKRQLRSPWHCFARDAENVLRQIVVSFKQNLR

SEQ ID NO: 3507 - protein, 186 aa, unidentified
  REGION 1..186: note = Description of Unknown: uncultivated organism with predicted taxonomy: Prevotella
  REGION 1..186: note = MG22-38 RuvC-III domain
NDTRYIARFMKGILSNIVREKNADGTLEPEETSKNLIVCSGRITDRVKQDWGLNDIWNHIVTPRFERLNTKTSSNDFGEYVCKEGKRYFQTRMPLSLQKGFNKKRIDHRHHAMDAIAIACVNRSIVNYLNNAAANQTEREDLRRAVCIPERNGQTKRQLRSPWHCFARDAENALRQIVVSFKQNLR

SEQ ID NO: 3508 - protein, 186 aa, unidentified; identical to SEQ ID NO: 3478
  REGION 1..186: note = Description of Unknown: uncultivated organism with predicted taxonomy: Prevotella sp. MGM2
  REGION 1..186: note = MG22-39 RuvC-III domain

SEQ ID NO: 3509 - protein, 185 aa, unidentified; identical to SEQ ID NO: 3503
  REGION 1..185: note = Description of Unknown: uncultivated organism with predicted taxonomy: Bacteroidales
  REGION 1..185: note = MG22-40 RuvC-III domain

SEQ ID NO: 3510 - protein, 186 aa, unidentified
  REGION 1..186: note = Description of Unknown: uncultivated organism with predicted taxonomy: Bacteroidales
  REGION 1..186: note = MG22-41 RuvC-III domain
NDTRYIARFMKGILSNIVREKNADGTLEPEETSKNLIVCSGRITDRVKQDWGLNDIWNHIITPRFERLNKKTSSNDFGEYVCKEGKRYFQTRVPLNLQKGFNKKRIDHRHHAMDAIAIACVNRSIVNYLNNAAANQTEREDLRRAVCIPERNGQTKRQLRSPWHCFARDAENALQQIVVSFKQNLR

SEQ ID NO: 3511 - protein, 186 aa, unidentified; identical to SEQ ID NO: 3494
  REGION 1..186: note = Description of Unknown: uncultivated organism with predicted taxonomy: Prevotella
  REGION 1..186: note = MG22-42 RuvC-III domain

SEQ ID NO: 3512 - protein, 186 aa, unidentified
  REGION 1..186: note = Description of Unknown: uncultivated organism with predicted taxonomy: Bacteroidales
  REGION 1..186: note = MG22-43 RuvC-III domain
NDTRYIARFMKGILSNIVREKNADGTLESEETSKNLIVCSGRITDRVKQDWGLNDIWNHIITPRFERLNTKTSSDKFGEYVCKEGKRYFQTRVPLNLQKGFNKKRIDHRHHAMDAIAIACVNRSIVNYLNNAAANQTEREDLRRAVCIPERNGQTKRQLRSPWRNFAKDAENALRQIVVSFKQNLR

SEQ ID NO: 3513 - protein, 186 aa, unidentified
  REGION 1..186: note = Description of Unknown: uncultivated organism with predicted taxonomy: Bacteroidales
  REGION 1..186: note = MG22-44 RuvC-III domain
NDTRYIARFMKGILSNIVREKNADGTLEPEETSKNLIVCSGRITDRVKQDWGLNDIWNHIVTPRFERLNTKTSSNDFGEYVCKDGKRYFQTRVPLNLQKGFNKKRIDHRHHAMDAIAIACVNRSIVNYLNNAAANQTEREDLRRAVCIPERNGQTKRQLRSPWPCFARDTENALRQIVVSFKQNLR

SEQ ID NO: 3514 - protein, 186 aa, unidentified; identical to SEQ ID NO: 3513
  REGION 1..186: note = Description of Unknown: uncultivated organism with predicted taxonomy: Bacteroidales
  REGION 1..186: note = MG22-45 RuvC-III domain

SEQ ID NO: 3515 - protein, 185 aa, unidentified; identical to SEQ ID NO: 3503
  REGION 1..185: note = Description of Unknown: uncultivated organism with predicted taxonomy: Bacteroidales
  REGION 1..185: note = MG22-46 RuvC-III domain

SEQ ID NO: 3516 - protein, 186 aa, unidentified; identical to SEQ ID NO: 3478
  REGION 1..186: note = Description of Unknown: uncultivated organism with predicted taxonomy: Bacteroidales
  REGION 1..186: note = MG22-47 RuvC-III domain

SEQ ID NO: 3517 - protein, 185 aa, unidentified; identical to SEQ ID NO: 3503
  REGION 1..185: note = Description of Unknown: uncultivated organism with predicted taxonomy: Bacteroidales
  REGION 1..185: note = MG22-48 RuvC-III domain

SEQ ID NO: 3518 - protein, 186 aa, unidentified
  REGION 1..186: note = Description of Unknown: uncultivated organism with predicted taxonomy: Bacteroidales
  REGION 1..186: note = MG22-49 RuvC-III domain
NDTRYIARFMKGILSNIVREKNADGTLEPEETSKNLIVCSGRITDRVKQDWGLNDIWNHIITPRFERLNTKTSSDKFGEYVCKEGKRYFQTRVPLSLQKGFNKKRIDHRHHAMDAIAIACVNRSIVNYLNNAAANQTEREDLRRAVCIPGRNGQTKRQLRSPWHCFAKDAENALRQIVVSFKQNLR

SEQ ID NO: 3519 - protein, 186 aa, unidentified; identical to SEQ ID NO: 3497
  REGION 1..186: note = Description of Unknown: uncultivated organism with predicted taxonomy: Bacteroidales
  REGION 1..186: note = MG22-50 RuvC-III domain

SEQ ID NO: 3520 - protein, 185 aa, unidentified
  REGION 1..185: note = Description of Unknown: uncultivated organism with predicted taxonomy: Prevotellaceae
  REGION 1..185: note = MG22-51 RuvC-III domain
TDTRYIARFMMGVLSNIVRQNDNGVLESEAISKNLIVCNGKITDRVKQDWGLNDVWNHIVTPRFERLNQITNSSDFGEWCNKEGKRYFQTRIPLELQKRVNKKRIDHRHHAMDAIAIACTTRSLVNYLNNQSAHTKAREDYRQRLCRTDGHGQTKRLLRAPWKDFAKDAESALQQIVVSFKQNTR

SEQ ID NO: 3521 - protein, 6 aa, unidentified
  REGION 1..6: note = Description of Unknown: uncultivated organism with predicted taxonomy: Prevotella sp. MGM2
  REGION 1..6: note = MG22-52 RuvC-III domain
ITNRII

SEQ ID NO: 3522 - protein, 186 aa, unidentified
  REGION 1..186: note = Description of Unknown: uncultivated organism with predicted taxonomy: Bacteroidales
  REGION 1..186: note = MG22-53 RuvC-III domain
NDTRYIARFMKGILSNIVRGKNADGKLEPEETSKNLIVCSGRITDRVKQDWGLNDIWNHIITPRFERLNKKTSSNDFGEYVCKDGKRYFQTRVPLNLQKGFNKKRIDHRHHAMDAIAIACVNRSIVNYLNNAAANQTEREDLRRAVCIPERNGQTKRQLRSPWHCFARDAENALRQIVVSFKQNLR

SEQ ID NO: 3523 - protein, 186 aa, unidentified
  REGION 1..186: note = Description of Unknown: uncultivated organism with predicted taxonomy: Bacteroidales
  REGION 1..186: note = MG22-54 RuvC-III domain
NDTRYIARFMKGILSNIVREKNADGTLEPEETSKNLIVCSGRITDRVKQDWGLNDIWNHIVTPRFERLNTKTSSNDFGEYVCKDGKRYFQTRVPLNLQKGFNKKRIDHRHHAMDAIAIACVNRSIVNYLNNAAANQTKREDLRRAVCIPERNGQTKRQLRSPWPCFARDTENALRQIVVSFKQNLR

SEQ ID NO: 3524 - protein, 186 aa, unidentified; identical to SEQ ID NO: 3523
  REGION 1..186: note = Description of Unknown: uncultivated organism with predicted taxonomy: Bacteroidales
  REGION 1..186: note = MG22-55 RuvC-III domain

SEQ ID NO: 3525 - protein, 186 aa, unidentified
  REGION 1..186: note = Description of Unknown: uncultivated organism with predicted taxonomy: Bacteroidales
  REGION 1..186: note = MG22-56 RuvC-III domain
NDTRYIARFMKGILSNIVREKNADGTLEQEETSKNLIVCSGRITDRVKQDWGLNDIWNHIITPRFERLNTKTSSDKFGEYVCKEGKRYFQTRVPLSLQKGFNKKRIDHRHHAMDAIAIACVNRSIVNYLNNAAANQTEREDLRRAVCIPERNGQTKRQLRSPWPCFARDTENALRQIVVSFKQNLR

SEQ ID NO: 3526 - protein, 186 aa, unidentified
  REGION 1..186: note = Description of Unknown: uncultivated organism with predicted taxonomy: Bacteroidales
  REGION 1..186: note = MG22-57 RuvC-III domain
NDTRYIARFMKGILSNIVREKNADGTLEPEETSKNLIVCSGRITDRVKQDWGLNDIWSHIVTPRFERLNTKTSSNDFGEYVCKDGKRYFQTRVPLNLQKGFNKKRIDHRHHAMDAIAIACVNRSIVNYLNNAAANQTEREDLRRAVYIPERNGQTKRQLRSPWHCFARDAENALRQIVVSFKQNLR

SEQ ID NO: 3527 - protein, 186 aa, unidentified; identical to SEQ ID NO: 3495
  REGION 1..186: note = Description of Unknown: uncultivated organism with predicted taxonomy: Bacteroidales
  REGION 1..186: note = MG22-58 RuvC-III domain

SEQ ID NO: 3528 - protein, 186 aa, unidentified; identical to SEQ ID NO: 3492
  REGION 1..186: note = Description of Unknown: uncultivated organism with predicted taxonomy: Bacteroidales
  REGION 1..186: note = MG22-59 RuvC-III domain

SEQ ID NO: 3529 - protein, 186 aa, unidentified; identical to SEQ ID NO: 3497
  REGION 1..186: note = Description of Unknown: uncultivated organism with predicted taxonomy: Bacteroidales
  REGION 1..186: note = MG22-60 RuvC-III domain

SEQ ID NO: 3530 - protein, 186 aa, unidentified
  REGION 1..186: note = Description of Unknown: uncultivated organism with predicted taxonomy: Bacteroidales
  REGION 1..186: note = MG22-61 RuvC-III domain
NDTRYIARFMKGILSNIVREKNADGTLEPEETSKNLIVCSGRITDRVKQDWGLNDIWNHIVTPRFERLNTKTSSNDFGEYVCKEGKRYFQTRVPLNLQKGFNKKRIDHRHHAMDAIAIACVNRSIVNYLNNAAANQIEREDLRRAVCIPERNGQTKRQLRSPWHCFARDAENALRQIVVSFKQNLR

SEQ ID NO: 3531 - protein, 186 aa, unidentified; identical to SEQ ID NO: 3495
  REGION 1..186: note = Description of Unknown: uncultivated organism with predicted taxonomy: Bacteroidales
  REGION 1..186: note = MG22-62 RuvC-III domain

SEQ ID NO: 3532 - protein, 186 aa, unidentified
  REGION 1..186: note = Description of Unknown: uncultivated organism with predicted taxonomy: Prevotella sp. MGM2
  REGION 1..186: note = MG22-64 RuvC-III domain
NDTRYIARFMKGILSNIVREKNADGTLEPEETSKNLIVCSGRITDRVKQDWGLNDIWNHIVTPRFERLNTKTSSNDFGEYVCKEGKRYFQTRVPLNLQKGFNKKRIDHRHHAMDAIAIACVNRSIVNYLNNAAANQTEREDLRRAVCIPERNGQTKRQLRSPWHCFARDAENALRQIVVSFKQNLR

SEQ ID NO: 3533 - protein, 186 aa, unidentified
  REGION 1..186: note = Description of Unknown: uncultivated organism with predicted taxonomy: Prevotella
  REGION 1..186: note = MG22-65 RuvC-III domain
NDTRYIARFMKGILSNIVREKNADGTLEPEETSKNLIVCSGRITDRVKQDWGLNDIWNHIVTPRFERLNTKTSSNDFGEYVCKDGKRYFQTRVPLNLQKGFNKKRIDHRHHAMDAIAIACVNRSIVNYLNNAAANQTEREDLRRAVCIPERNGQTKRQLRSPWHCFARDAENALRQIIVSFKQNLR

SEQ ID NO: 3534 - protein, 40 aa, unidentified
  REGION 1..40: note = Description of Unknown: uncultivated organism with predicted taxonomy: Prevotella sp. MGM2
  REGION 1..40: note = MG22-66 RuvC-III domain
NDTRYIARFMKGILSNIVREKNADGTLEPEETSKNLIVCS

SEQ ID NO: 3535 - protein, 186 aa, unidentified; identical to SEQ ID NO: 3497
  REGION 1..186: note = Description of Unknown: uncultivated organism with predicted taxonomy: Bacteroidales
  REGION 1..186: note = MG22-68 RuvC-III domain

SEQ ID NO: 3536 - protein, 186 aa, unidentified
  REGION 1..186: note = Description of Unknown: uncultivated organism with predicted taxonomy: Bacteroidales
  REGION 1..186: note = MG22-69 RuvC-III domain
NDTRYIARFMKGILSNIVREKNADGTLEPEETSKNLIVCSGRITDRVKQDWGLNDIWNHIVTPRFERLNTKTSSNDFGEYVCKEGKRYFQTRVPLNLQKGFNKKRIDHRHHAMDAITIACVNRSIVNYLNNAAANQTEREDLRRAVCIPERNGQTKRQLRSPWHCFARDAENALRQIVVSFKQNLR

SEQ ID NO: 3537 - protein, 186 aa, unidentified
  REGION 1..186: note = Description of Unknown: uncultivated organism with predicted taxonomy: Bacteroidales
  REGION 1..186: note = MG22-70 RuvC-III domain
NDTRYIARFMKGILSNIVREKNADGTLEPEETSKNLIVCSGRITDRVKQDWGLNDIWNHIITPRFERLNTKTSSNDFGEYVCKDGKRYFQTRVPLNLQKGFNKKRIDHRHHAMDAIAIACVNRSIVNYLNNAAANQTEREDLRRAVCIPERNGQTKRQLRSPWPCFARDAENALRQIVVSFKQNLR

SEQ ID NO: 3538 - protein, 185 aa, unidentified; identical to SEQ ID NO: 3520
  REGION 1..185: note = Description of Unknown: uncultivated organism with predicted taxonomy: Bacteroidales
  REGION 1..185: note = MG22-71 RuvC-III domain

SEQ ID NO: 3539 - protein, 186 aa, unidentified
  REGION 1..186: note = Description of Unknown: uncultivated organism with predicted taxonomy: Bacteroidales
  REGION 1..186: note = MG22-72 RuvC-III domain
NDTRYIARFMKGILSNIVREKNADGTLEPEETSKNLIVCSGRITDRVKQDWGLNDIWNHIVTPRFERLNTKTSSNDFGEYVCKDGKRYFQTRVPLNLQKGFNKKRIDHRHHAMDAIAIACVNRSIVNYLNNAAANQTEREDLRRAVCIPERNGQTKRQLRSPWHCFARDAENALRQIVVSFKQNLR

SEQ ID NO: 3540 - protein, 186 aa, unidentified; identical to SEQ ID NO: 3487
  REGION 1..186: note = Description of Unknown: uncultivated organism with predicted taxonomy: Prevotella sp. MGM2
  REGION 1..186: note = MG22-73 RuvC-III domain

SEQ ID NO: 3541 - protein, 186 aa, unidentified; identical to SEQ ID NO: 3487
  REGION 1..186: note = Description of Unknown: uncultivated organism with predicted taxonomy: Bacteroidales
  REGION 1..186: note = MG22-74 RuvC-III domain

SEQ ID NO: 3542 - protein, 186 aa, unidentified
  REGION 1..186: note = Description of Unknown: uncultivated organism with predicted taxonomy: Bacteroidales
  REGION 1..186: note = MG22-75 RuvC-III domain
NDTRYIARFMKGILSNIVREKNADGTLELEETSKNLIVCSGRITDRIKQDWGLNDVWNHIITPRFERLNQKTSSDNFGEYVCKEGKRYFQTRVPLNLQKGFNKKRIDHRHHAIDAIAIACVNRSIVNYLNNAAANQTEREDLRRAVCIPERNGQTKRQLRSPWRNFAKDAENALRQIVVSFKQNLR

SEQ ID NO: 3543 - protein, 186 aa, unidentified; identical to SEQ ID NO: 3475
  REGION 1..186: note = Description of Unknown: uncultivated organism with predicted taxonomy: Bacteroidales
  REGION 1..186: note = MG22-76 RuvC-III domain

SEQ ID NO: 3544 - protein, 186 aa, unidentified; identical to SEQ ID NO: 3507
  REGION 1..186: note = Description of Unknown: uncultivated organism with predicted taxonomy: Prevotella
  REGION 1..186: note = MG22-77 RuvC-III domain

SEQ ID NO: 3545 - protein, 186 aa, unidentified; identical to SEQ ID NO: 3492
  REGION 1..186: note = Description of Unknown: uncultivated organism with predicted taxonomy: Bacteroidales
  REGION 1..186: note = MG22-78 RuvC-III domain

SEQ ID NO: 3546 - protein, 186 aa, unidentified
  REGION 1..186: note = Description of Unknown: uncultivated organism with predicted taxonomy: Bacteroidales
  REGION 1..186: note = MG22-79 RuvC-III domain
NDTRYIARFMKGILSNIVREKNTDGTLEPEETSKNLIVCSGRITDRVKQDWGLNDIWNHIITPRFERLNTKTSSNDFGEYVCKEGKRYFQTRVPLNLQKGFNKKRIDHRHHAMDAIAIACVNRSIVNYLNNAAANQTEREDLRRAVCIPERNGQTKRQLRSPWHCFARDTENALRQIVVSFKQNLR

SEQ ID NO: 3547 - protein, 186 aa, unidentified
  REGION 1..186: note = Description of Unknown: uncultivated organism with predicted taxonomy: Bacteroidales
  REGION 1..186: note = MG22-80 RuvC-III domain
NDTRYIARFMKGILSNIVREKNADGTLEPEETSKNLIVCSGRITDSVKQDWGLNDIWNHIITPRFERLNTKTSSNDFGEYVCKDGKRYFQTRVPLNLQKGFNKKRIDHRHHAMDAIAIACVNRSIVNYLNNAAANPTEREDLRRAVCIPERNGQTKRQLRSPWHCFARDAENALRQIVVSFKQNLR

SEQ ID NO: 3548 - protein, 185 aa, unidentified; identical to SEQ ID NO: 3520
  REGION 1..185: note = Description of Unknown: uncultivated organism with predicted taxonomy: Bacteroidales
  REGION 1..185: note = MG22-81 RuvC-III domain

SEQ ID NO: 3549 - protein, 186 aa, unidentified; identical to SEQ ID NO: 3533
  REGION 1..186: note = Description of Unknown: uncultivated organism with predicted taxonomy: Prevotella
  REGION 1..186: note = MG22-82 RuvC-III domain

SEQ ID NO: 3550 - protein, 186 aa, unidentified
  REGION 1..186: note = Description of Unknown: uncultivated organism with predicted taxonomy: Prevotella
  REGION 1..186: note = MG22-83 RuvC-III domain
NDTRYIARFMKGILSNIVREKNADGTLEPEETSKNLIVCSGRITDRVKQDWGLNDIWSHIVTPRFERLNTKTSSNDFGEYVCKDGKRYFQTRVPLNLQKGFNKKRIDHRHHAMDAIAIACVNRSIVNYLNNAAANQTEREDLRRAVCIPERNGQTKRQLRSPWHCFARDAENALRQIVVSFKQNLR

SEQ ID NO: 3551 - protein, 186 aa, unidentified
  REGION 1..186: note = Description of Unknown: uncultivated organism with predicted taxonomy: Bacteroidales
  REGION 1..186: note = MG22-84 RuvC-III domain
NDTRYIARFMKGILSNIVREKNADGTLEQEETSKNLIVCSGRITDRVKQDWGLNDIWNHIITPRFERLNTKTSSDKFGEYVCKEGKRYFQTRVPLSLQKGFNKKRIDHRHHAMDAIAIACVNRSIVNYLNNAAANQTEREDLRRAVCIPERNGQTKRQLRSPWHCFARDTENALRQIVVSFKQNLR

SEQ ID NO: 3552 - protein, 186 aa, unidentified
  REGION 1..186: note = Description of Unknown: uncultivated organism with predicted taxonomy: Prevotella
  REGION 1..186: note = MG22-85 RuvC-III domain
NDTRYIARFMKGILSNIVREKNADGTLEPEETSKNLIVCSGRITDRVKQDWGLNDIWNHIITQRFERLNKKTSSNDFGEYVCKDGKRYFQTRVPLNLQKGFNKKRIDHRHHAMDAIAIACVNRSIVNYLNNAAANQTEREDLRRAVCIPERNGQTKRQLRSPWHCFARDAENALRQIVVSFKQNLR

SEQ ID NO: 3553 - protein, 186 aa, unidentified; identical to SEQ ID NO: 3491
  REGION 1..186: note = Description of Unknown: uncultivated organism with predicted taxonomy: Bacteroidales
  REGION 1..186: note = MG22-86 RuvC-III domain

SEQ ID NO: 3554 - protein, 157 aa, unidentified
  REGION 1..157: note = Description of Unknown: uncultivated organism with predicted taxonomy: Prevotella sp. MGM2
  REGION 1..157: note = MG22-87 RuvC-III domain
NDTRYIARFMKGILSNIVREKNADGTLEPEETSKNLIVCSGRITDRVKQDWGLNDIWNHIVTPRFERLNTKTSSNDFGEYVCKEGKQYFQTRVPLNLQKGFNKKRIDHRHHAMDAIAIACVNRSIVNYLNNAAANQIEREALRRAVCIPERNGQTKR

SEQ ID NO: 3555 - protein, 186 aa, unidentified; identical to SEQ ID NO: 3522
  REGION 1..186: note = Description of Unknown: uncultivated organism with predicted taxonomy: Prevotella sp. MGM2
  REGION 1..186: note = MG22-88 RuvC-III domain

SEQ ID NO: 3556 - protein, 186 aa, unidentified; identical to SEQ ID NO: 3491
  REGION 1..186: note = Description of Unknown: uncultivated organism with predicted taxonomy: Prevotella sp. MGM2
  REGION 1..186: note = MG22-89 RuvC-III domain

SEQ ID NO: 3557 - protein, 186 aa, unidentified
  REGION 1..186: note = Description of Unknown: uncultivated organism with predicted taxonomy: Bacteroidales
  REGION 1..186: note = MG22-90 RuvC-III domain
NDTRYIARFMKGILSNIVREKNTDGTLEPEETSKNLIVCSGRITDRVKQDWGLNDIWNHIITPRFERLNTKTSSNDFGEYVCKDGKRYFQTRVPLNLQKGFNKKRIDHRHHAMDAIAIACVNRSIVNYLNNAAANQTEREDLRRAVCIPERNGQTKRQLRSPWPCFARDTENALRQIVVSFKQNLR

SEQ ID NO: 3558 - protein, 186 aa, unidentified
  REGION 1..186: note = Description of Unknown: uncultivated organism with predicted taxonomy: Prevotella
  REGION 1..186: note = MG22-91 RuvC-III domain
NDTRYIVRFMKGILSNIVRGKNADGKLEPEETSKNLIVCSGRITDRVKQDWGLNDIWNHIITPRFERLNKKTSSNDFGEYVCKDGKRYFQTRVPLNLQKGFNKKRIDHRHHAMDAIAIACVNRSIVNYLNNAAANQTEREDLRRAVCIPERNGQTKRQLRSPWHCFARDAENALRQIVVSFKQNLR

SEQ ID NO: 3559 - protein, 186 aa, unidentified; identical to SEQ ID NO: 3485
  REGION 1..186: note = Description of Unknown: uncultivated organism with predicted taxonomy: Bacteroidales
  REGION 1..186: note = MG22-92 RuvC-III domain

SEQ ID NO: 3560 - protein, 8 aa, unidentified
  REGION 1..8: note = Description of Unknown: uncultivated organism with predicted taxonomy: Bacteroides
  REGION 1..8: note = MG22-93 RuvC-III domain
ISMKSTWR

SEQ ID NO: 3561 - protein, 184 aa, unidentified
  REGION 1..184: note = Description of Unknown: uncultivated organism with predicted taxonomy: Prevotella
  REGION 1..184: note = MG22-94 RuvC-III domain
NDTRYISRYIIGELSKLVREEKPDGTLEQEPTSKNVVVLNGSVTDKLKKDWGLVDVWNEIITPRFRRLNEMEGSQRFGQDAEKGGKRYFQITMPLELQRGFQRKRIDHRHHAMDAITIACATRQVINYLNNDHSHAGQGREDLHRAVCRKRGSEWFIRKPWDTFTQDAHARLNQIVISFKQNLR

SEQ ID NO: 3562 - protein, 196 aa, unidentified
  REGION 1..196: note = Description of Unknown: uncultivated organism with predicted taxonomy: Bacteroidales
  REGION 1..196: note = MG22-95 RuvC-III domain
NDTRYISKVVKSLLSNVVRERDEEGNLEAEAISKNVIVPVGAMTDRLKQDWGLKDVWNQLMLPRFRALNDKMAPYRFTKITRRGHEIPAMPLELVKGFSKKRIDHRHHAMDAIAIACTTRRHIQYINGDAGEAEADKSKYIDKQRVIDARRTIRNKIAHRLDGDGKPIFDKPWTTFTEDVKRALENLIVSFKQTNK

SEQ ID NO: 3563 - protein, 187 aa, unidentified
  REGION 1..187: note = Description of Unknown: uncultivated organism with predicted taxonomy: Bacteroidales
  REGION 1..187: note = MG22-96 RuvC-III domain
NDSRYISKLMIGLLSNIVREETDGHLEEEAISKNLIVCTGKVTERLKQDWGLKDVWNEIIRPRFERLNQMEQTERFGHWENKQGKNVFQITIPIELSSSVDRKRIDHRHHAMDAITIACATRNMVNYLSNQASGKTRFDLQHALCIKQKMDAQGNYKWLIRKPWQTFTEDAKTALNEIVVSFKQNLR

SEQ ID NO: 3564 - protein, 187 aa, unidentified
  REGION 1..187: note = Description of Unknown: uncultivated organism with predicted taxonomy: Bacteroidetes
  REGION 1..187: note = MG22-97 RuvC-III domain
NDSRYISKLMIGLLSNIVREDADGQLEEEAISKNLIVCTGKVTERLKQDWGLKDVWNEIIRPRFERLNHMEQSERFGHWENKQGKNVFQITIPLELSSSVDRKRIDHRHHAMDAITIACATRNMVNYLSNQASGKARYDLQHVLCVKQKMDAQGNYKWLIRKPWQTFTEDAKAAIKEIVVSFKQNLR

SEQ ID NO: 3565 - protein, 69 aa, unidentified
  REGION 1..69: note = Description of Unknown: uncultivated organism with predicted taxonomy: Bacteroidales
  REGION 1..69: note = MG22-98 RuvC-III domain
TDTQYIASTMMRLLSNIVREQDPDGSLEREVRSKNPIVCTGGITDKLKKDWGVNDAWNRIILPRFKRMD

SEQ ID NO: 3566 - protein, 196 aa, unidentified
  REGION 1..196: note = Description of Unknown: uncultivated organism with predicted taxonomy: Flavobacteriales
  REGION 1..196: note = MG22-99 RuvC-III domain
NNTRYISRLVMTILSNIVRDDREDGKSDEGIRANRLITCQGGVTDKLKKDWHVNDVWNRIILPRYERMQNEVMKGVTFVTNNSRGHEIPTMPDKLKTEEYNPKRIDHRHHAMDAIVIACATRSIVNFLNNESARDEASEGSEKAKARQTYAELRSLLCVKDADNDEKVIRKPWENFEVDVLKALEDIVVSTKHKQR

SEQ ID NO: 3567 - protein, 184 aa, unidentified
  REGION 1..184: note = Description of Unknown: uncultivated organism with predicted taxonomy: Bacteroidales
  REGION 1..184: note = MG22-100 RuvC-III domain
NDTRYIARFIMGELSKLVRQQNADGTYEEEATSKNVIVLNGAITDKLKKDWGLVDVWNGIIAERFKRLNQMEGGTRFGHEENKDGKRYFQIEMPLELQRGFNRKRIDHRHHAMDAIVIACATRAVVNYLNNDHAHDGAGREDVKRAVSRKRDQTWLINKPWPTFTEEAKEELKQMVVSFKQNLR

SEQ ID NO: 3568 - protein, 184 aa, unidentified
  REGION 1..184: note = Description of Unknown: uncultivated organism with predicted taxonomy: Bacteroidales
  REGION 1..184: note = MG22-101 RuvC-III domain
NDTRYISRFIIGELSKLVREHNPDGTLEQEAVSKNILILNGAVTDKLKKDWGLVDVWNGIIAPRFRRLNAMEGSQRFGHEAMKDGKRYFQIEMPLELQRGFQRKRIDHRHHAMDAIAIACATRNVVNYLNNDHSHEGAGREDIKRAVSSKRSGQWLVNKPWSTFTQEARKQLQQIVVSFKQNLR

SEQ ID NO: 3569 - protein, 139 aa, unidentified
  REGION 1..139: note = Description of Unknown: uncultivated organism with predicted taxonomy: Clostridia
  REGION 1..139: note = MG23-1 RuvC-III domain
VETRQGTKAIADILKQALPDTEIVYVKAGLVSDFRQKFELYKVRALNDTHHAKDAYLNIVVGNTYSTKFTNNPLNFIKAGAKRPQDNQFKYNMDKIFDYNVISRGERAWIAGSDGSICTVKKFMSRNTVLITRKAKEVH

SEQ ID NO: 3570 - protein, 143 aa, unidentified
  REGION 1..143: note = Description of Unknown: uncultivated organism with predicted taxonomy: Firmicutes
  REGION 1..143: note = MG23-3 RuvC-III domain
VETRQGTKAITKILQQAFPDDDMEVVFTKAGVAAKLRHDFDLVKVRCVNDTHHAHDAYLNIVAGNVYNAKFTSNPLRFIKNEVKKGNASYHMDKIFFRDVKRGNKLVWQAPNNEEKTPGTIAIVREQLARRTVLQTRRSYMAH

SEQ ID NO: 3571 - protein, 142 aa, unidentified
  REGION 1..142: note = Description of Unknown: uncultivated organism with predicted taxonomy: Clostridiales
  REGION 1..142: note = MG23-4 RuvC-III domain
VETRQGTKAIIQILRQIFPDTMVVFSKAGEVSAFRHKFNLEKVRCLNDFHHAQDAYLNIVVGNAYYVKFTANPINFIREAEKNPQKDLYKYHMDKFFEYTVQRGDETAWIGTKDEKNSTIHIVKKVMARNTPLITKRCYTVH

SEQ ID NO: 3572 - protein, 143 aa, unidentified
  REGION 1..143: note = Description of Unknown: uncultivated organism with predicted taxonomy: Firmicutes
  REGION 1..143: note = MG23-5 RuvC-III domain
VETRQGTKAITQILKRVFKNEAVEIIFTKAELISDFRRIFDLPKVRCVNSTHHAHDAYLNIVVGNVYNAKFTKHPRHFIEECQRKGSYDYNMYRMFDYDVKCGSKIVWCGSKITTCGKGTISTVKKQLQKRSVLLTKKSFMKH

SEQ ID NO: 3573 - protein, 143 aa, unidentified
  REGION 1..143: note = Description of Unknown: uncultivated organism with predicted taxonomy: Clostridiales
  REGION 1..143: note = MG23-6 RuvC-III domain
VETRQGTKAITQILKEAFKNDDTRIVFTKAEVTADFRHKYDLPKARSVNNLHHAHDAYLNIVAGNVYDAKFTSHPINFIKECRNKGVFNYNMAKVFDYNVKRGNRYVWIAQNDGMDMPLTIERVKNQLARNTILMTRRSYMAH

SEQ ID NO: 3574 - protein, 142 aa, unidentified; identical to SEQ ID NO: 3571
  REGION 1..142: note = Description of Unknown: uncultivated organism with predicted taxonomy: Clostridiales
  REGION 1..142: note = MG23-7 RuvC-III domain

SEQ ID NO: 3575 - protein, 142 aa, unidentified
  REGION 1..142: note = Description of Unknown: uncultivated organism with predicted taxonomy: Clostridiales
  REGION 1..142: note = MG23-8 RuvC-III domain
VETRQGTKAITQILRQIFPDTMVVFSKAGEVSAFRHKFNLEKVRCLNDFHHAQDAYLNIVVGNAYYVKFTANPINFIREAEKNPQKDLYKYHMDKFFEYTVQRGDETAWIGTKDEKNSTIHIVKKVMARNTPLITKRCYTVH

SEQ ID NO: 3576 - protein, 142 aa, unidentified; identical to SEQ ID NO: 3575
  REGION 1..142: note = Description of Unknown: uncultivated organism with predicted taxonomy: Clostridiales
  REGION 1..142: note = MG23-9 RuvC-III domain

SEQ ID NO: 3577 - protein, 139 aa, unidentified
  REGION 1..139: note = Description of Unknown: uncultivated organism with predicted taxonomy: Clostridiales
  REGION 1..139: note = MG23-10 RuvC-III domain
VETGQGTKVITQILKQAFPDTQVVFVKARMVSDFRHEFGINKVRELNDTHHAKDAYLNIVVGNTYYTKFTNNPINFMKNAEKNPEDVQYKYNMDKIFRYNVIRNGETAWIADNGVTKQHVIKTINRNTVTITRKTEEVH

SEQ ID NO: 3578 - protein, 139 aa, unidentified
  REGION 1..139: note = Description of Unknown: uncultivated organism with predicted taxonomy: Butyrivibrio sp. CAG:318
  REGION 1..139: note = MG23-11 RuvC-III domain
VETRQGTKAITQVLKQAFPNTQIVFVKAGIVSDFRKKFDINKVRALNDTHHAKDAYLNIVVGNTYYTKFTNNPMNFIKDARKNPKNDFYRYNMDKIFDYNVIRNGEEAWIADNGKTKQHVLRIMKKNSVTITVKTEEYH

SEQ ID NO: 3579 - protein, 139 aa, unidentified
  REGION 1..139: note = Description of Unknown: uncultivated organism with predicted taxonomy: Butyrivibrio sp. CAG:318
  REGION 1..139: note = MG23-12 RuvC-III domain
VETRQGTKAITQVLKQAFPNTQIVFVKAGIVSDFRKKFDINKVRALNDTHHAKDAYLNIVVGNTYYTKFTNNPMNFIKDARKNPKNDFYRYNMDKIFDYNVIRNGEEAWIADNGKTKQHVLRIMKKNSVIITVKTEEAN

SEQ ID NO: 3580 - protein, 139 aa, unidentified
  REGION 1..139: note = Description of Unknown: uncultivated organism with predicted taxonomy: Clostridium sp. AF36-4
  REGION 1..139: note = MG23-13 RuvC-III domain
VETGQGTKVITQILKQAFPDTQVVFVKARMVSDFRHEFGINKVRELNDTHHAKDAYLNIVVGNTYNTKFTNNPINFMKNAEKNPEDVQYKYNMDKIFRYNVIRNGETAWIADNGVTKQHVLKTINRNTVTITRKTEEVH

SEQ ID NO: 3581 - protein, 139 aa, unidentified; identical to SEQ ID NO: 3578
  REGION 1..139: note = Description of Unknown: uncultivated organism with predicted taxonomy: Butyrivibrio sp. CAG:318
  REGION 1..139: note = MG23-14 RuvC-III domain

SEQ ID NO: 3582 - protein, 139 aa, unidentified; identical to SEQ ID NO: 3578
  REGION 1..139: note = Description of Unknown: uncultivated organism with predicted taxonomy: Butyrivibrio sp. CAG:318
  REGION 1..139: note = MG23-15 RuvC-III domain

SEQ ID NO: 3583 - protein, 139 aa, unidentified; identical to SEQ ID NO: 3580
  REGION 1..139: note = Description of Unknown: uncultivated organism with predicted taxonomy: Clostridium sp. AF36-4
  REGION 1..139: note = MG23-16 RuvC-III domain

SEQ ID NO: 3584 - protein, 139 aa, unidentified; identical to SEQ ID NO: 3579
  REGION 1..139: note = Description of Unknown: uncultivated organism with predicted taxonomy: Butyrivibrio sp. CAG:318
  REGION 1..139: note = MG23-17 RuvC-III domain

SEQ ID NO: 3585 - protein, 139 aa, unidentified
  REGION 1..139: note = Description of Unknown: uncultivated organism with predicted taxonomy: Clostridiales
  REGION 1..139: note = MG23-18 RuvC-III domain
VETGQGTKVITQILKQAFPDTQVVFVKARMVSDFRHEFGINKVRELNDTHHAKDAYLNIVVGNTYNTKFTNNPINFMKNAEKNPEDVQYKYNMDKIFRYNVIRNGETAWIADNGTTKQHVIKTINRNTVTITRKTEEVH

SEQ ID NO: 3586 - protein, 139 aa, unidentified; identical to SEQ ID NO: 3578
  REGION 1..139: note = Description of Unknown: uncultivated organism with predicted taxonomy: Butyrivibrio sp. CAG:318
  REGION 1..139: note = MG23-19 RuvC-III domain

SEQ ID NO: 3587 - protein, 139 aa, unidentified; identical to SEQ ID NO: 3578
  REGION 1..139: note = Description of Unknown: uncultivated organism with predicted taxonomy: Butyrivibrio sp. CAG:318
  REGION 1..139: note = MG23-20 RuvC-III domain

SEQ ID NO: 3588 - protein, 48 aa, unidentified
  REGION 1..48: note = Description of Unknown: uncultivated organism with predicted taxonomy: Butyrivibrio sp. CAG:318
  REGION 1..48: note = MG23-21 RuvC-III domain
VETRQGTKAITQVLKQAFPNTQIVFVKAGIVSDFRKKFDINKVRALND

SEQ ID NO: 3589 - protein, 139 aa, unidentified; identical to SEQ ID NO: 3578
  REGION 1..139: note = Description of Unknown: uncultivated organism with predicted taxonomy: Butyrivibrio sp. CAG:318
  REGION 1..139: note = MG23-22 RuvC-III domain

SEQ ID NO: 3590 - protein, 139 aa, unidentified; identical to SEQ ID NO: 3579
  REGION 1..139: note = Description of Unknown: uncultivated organism with predicted taxonomy: Butyrivibrio sp. CAG:318
  REGION 1..139: note = MG23-23 RuvC-III domain

SEQ ID NO: 3591 - protein, 139 aa, unidentified
  REGION 1..139: note = Description of Unknown: uncultivated organism with predicted taxonomy: Clostridiales
  REGION 1..139: note = MG23-24 RuvC-III domain
VETGQGTKVITQILKQAFPDTQVVFVKARMVSDFRHEFGINKVRELNDTHHAKDAYLNIVVGNTYYTKFTNNPINFMKNAEKNPEDVQYKYNMDKIFRYNVIRNGETAWIADNGVTKQHVLKTINRNTVTITRKTEEVH

SEQ ID NO: 3592 - protein, 139 aa, unidentified
  REGION 1..139: note = Description of Unknown: uncultivated organism with predicted taxonomy: Butyrivibrio sp. CAG:318
  REGION 1..139: note = MG23-25 RuvC-III domain
VETRQGTKAITQVLKQAFPNTQIVFVKAGIVSDFRKKFDINKVRALNDTHHAKDAYLNIVVGNTYYTKFTNNPMNFIKDARKNPKNDFYRYNMDKIFDYNVIRNGEEAWIADNGKTKQHVLQIMKKNSVTITVKTEEYH

SEQ ID NO: 3593 - protein, 139 aa, unidentified; identical to SEQ ID NO: 3578
  REGION 1..139: note = Description of Unknown: uncultivated organism with predicted taxonomy: Butyrivibrio sp. CAG:318
  REGION 1..139: note = MG23-26 RuvC-III domain

SEQ ID NO: 3594 - protein, 139 aa, unidentified; identical to SEQ ID NO: 3578
  REGION 1..139: note = Description of Unknown: uncultivated organism with predicted taxonomy: Butyrivibrio sp. CAG:318
  REGION 1..139: note = MG23-27 RuvC-III domain

SEQ ID NO: 3595 - protein, 139 aa, unidentified; identical to SEQ ID NO: 3579
  REGION 1..139: note = Description of Unknown: uncultivated organism with predicted taxonomy: Butyrivibrio sp. CAG:318
  REGION 1..139: note = MG23-28 RuvC-III domain

SEQ ID NO: 3596 - protein, 139 aa, unidentified; identical to SEQ ID NO: 3578
  REGION 1..139: note = Description of Unknown: uncultivated organism with predicted taxonomy: Butyrivibrio sp. CAG:318
  REGION 1..139: note = MG23-29 RuvC-III domain

SEQ ID NO: 3597 - protein, 139 aa, unidentified; identical to SEQ ID NO: 3578
  REGION 1..139: note = Description of Unknown: uncultivated organism with predicted taxonomy: Butyrivibrio sp. CAG:318
  REGION 1..139: note = MG23-30 RuvC-III domain

SEQ ID NO: 3598 - protein, 139 aa, unidentified; identical to SEQ ID NO: 3578
  REGION 1..139: note = Description of Unknown: uncultivated organism with predicted taxonomy: Butyrivibrio sp. CAG:318
  REGION 1..139: note = MG23-31 RuvC-III domain

SEQ ID NO: 3599 - protein, 139 aa, unidentified; identical to SEQ ID NO: 3592
  REGION 1..139: note = Description of Unknown: uncultivated organism with predicted taxonomy: Butyrivibrio sp. CAG:318
  REGION 1..139: note = MG23-32 RuvC-III domain

SEQ ID NO: 3600 - protein, 139 aa, unidentified; identical to SEQ ID NO: 3591
  REGION 1..139: note = Description of Unknown: uncultivated organism with predicted taxonomy: Clostridiales
  REGION 1..139: note = MG23-33 RuvC-III domain

SEQ ID NO: 3601 - protein, 139 aa, unidentified
  REGION 1..139: note = Description of Unknown: uncultivated organism with predicted taxonomy: Butyrivibrio sp. CAG:318
  REGION 1..139: note = MG23-34 RuvC-III domain
VETRQGTKAISQVLKQAFPNTQIVFVKAGIVSDFRKKFDINKVRALNDTHHAKDAYLNIVVGNTYYTKFTNNPMNFIKDARKNPKNDFYRYNMDKIFDYNVIRNGEEAWIADNGKTKQHVLRIMKKNSVTITVKTEEYH

SEQ ID NO: 3602 - protein, 139 aa, unidentified
  REGION 1..139: note = Description of Unknown: uncultivated organism with predicted taxonomy: Butyrivibrio sp. CAG:318
  REGION 1..139: note = MG23-35 RuvC-III domain
VETRQGTKAITQILKQAFPNTQIVFVKAGIVSDFRKKFDINKVRALNDTHHAKDAYLNIVVGNTYYTKFTNNPMNFIKDASKNPKNDFYRYNMDKIFDYNVIRNGEEAWIADNGKTKQHVLRIMKKNSVTITVKTEEYH

SEQ ID NO: 3603 - protein, 139 aa, unidentified; identical to SEQ ID NO: 3591
  REGION 1..139: note = Description of Unknown: uncultivated organism with predicted taxonomy: Clostridiales
  REGION 1..139: note = MG23-36 RuvC-III domain

SEQ ID NO: 3604 - protein, 139 aa, unidentified; identical to SEQ ID NO: 3591
  REGION 1..139: note = Description of Unknown: uncultivated organism with predicted taxonomy: Clostridiales
  REGION 1..139: note = MG23-37 RuvC-III domain

SEQ ID NO: 3605 - protein, 139 aa, unidentified; identical to SEQ ID NO: 3578
  REGION 1..139: note = Description of Unknown: uncultivated organism with predicted taxonomy: Butyrivibrio sp. CAG:318
  REGION 1..139: note = MG23-38 RuvC-III domain

SEQ ID NO: 3606 - protein, 139 aa, unidentified; identical to SEQ ID NO: 3578
  REGION 1..139: note = Description of Unknown: uncultivated organism with predicted taxonomy: Butyrivibrio sp. CAG:318
  REGION 1..139: note = MG23-39 RuvC-III domain

SEQ ID NO: 3607 - protein, 139 aa, unidentified; identical to SEQ ID NO: 3592
  REGION 1..139: note = Description of Unknown: uncultivated organism with predicted taxonomy: Butyrivibrio sp. CAG:318
  REGION 1..139: note = MG23-40 RuvC-III domain

SEQ ID NO: 3608 - protein, 139 aa, unidentified; identical to SEQ ID NO: 3591
  REGION 1..139: note = Description of Unknown: uncultivated organism with predicted taxonomy: Clostridiales
  REGION 1..139: note = MG23-41 RuvC-III domain

SEQ ID NO: 3609 - protein, 139 aa, unidentified; identical to SEQ ID NO: 3592
  REGION 1..139: note = Description of Unknown: uncultivated organism with predicted taxonomy: Butyrivibrio sp. CAG:318
  REGION 1..139: note = MG23-42 RuvC-III domain

SEQ ID NO: 3610 - protein, 139 aa, unidentified; identical to SEQ ID NO: 3578
  REGION 1..139: note = Description of Unknown: uncultivated organism with predicted taxonomy: Butyrivibrio sp. CAG:318
  REGION 1..139: note = MG23-43 RuvC-III domain

SEQ ID NO: 3611 - protein, 139 aa, unidentified; identical to SEQ ID NO: 3579
  REGION 1..139: note = Description of Unknown: uncultivated organism with predicted taxonomy: Butyrivibrio sp. CAG:318
  REGION 1..139: note = MG23-44 RuvC-III domain

SEQ ID NO: 3612 - protein, 97 aa, unidentified
  REGION 1..97: note = Description of Unknown: uncultivated organism with predicted taxonomy: Butyrivibrio sp. CAG:318
  REGION 1..97: note = MG23-45 RuvC-III domain
VETRQGTKAITQVLKQAFPNTQIVFVKAGIVSDFRKKFDINKVRALNDTHHAKDAYLNIVVGNTYYTKFTNNPMNFIKDARKNPKNDFYRYNMDKIF

SEQ ID NO: 3613 - protein, 139 aa, unidentified; identical to SEQ ID NO: 3591
  REGION 1..139: note = Description of Unknown: uncultivated organism with predicted taxonomy: Clostridiales
  REGION 1..139: note = MG23-46 RuvC-III domain

SEQ ID NO: 3614 - protein, 139 aa, unidentified; identical to SEQ ID NO: 3592
  REGION 1..139: note = Description of Unknown: uncultivated organism with predicted taxonomy: Butyrivibrio sp. CAG:318
  REGION 1..139: note = MG23-47 RuvC-III domain

SEQ ID NO: 3615 - protein, 139 aa, unidentified; identical to SEQ ID NO: 3578
  REGION 1..139: note = Description of Unknown: uncultivated organism with predicted taxonomy: Butyrivibrio sp. CAG:318
  REGION 1..139: note = MG23-48 RuvC-III domain

SEQ ID NO: 3616 - protein, 33 aa, unidentified
  REGION 1..33: note = Description of Unknown: uncultivated organism with predicted taxonomy: Clostridiales
  REGION 1..33: note = MG23-49 RuvC-III domain
VETGQGTKVITQILKQAFPDTQVVFVKARMVSD

SEQ ID NO: 3617 - protein, 139 aa, unidentified
  REGION 1..139: note = Description of Unknown: uncultivated organism with predicted taxonomy: Clostridiales
  REGION 1..139: note = MG23-50 RuvC-III domain
VETRQGTKAVTQILKQAFPDTQIIFVKAGVVSDFRKKFNINKVRALNDTHHAKDAYLNIVVGNIYNTKFTSNPINFIKDARKNVNDISYKYNMDKMFDYNVCRNGENAWIADNGKSKQHVLSVLGKNSVIITRKTEENH

SEQ ID NO: 3618 - protein, 139 aa, unidentified; identical to SEQ ID NO: 3591
  REGION 1..139: note = Description of Unknown: uncultivated organism with predicted taxonomy: Clostridiales
  REGION 1..139: note = MG23-51 RuvC-III domain

SEQ ID NO: 3619 - protein, 139 aa, unidentified; identical to SEQ ID NO: 3592
  REGION 1..139: note = Description of Unknown: uncultivated organism with predicted taxonomy: Butyrivibrio sp. CAG:318
  REGION 1..139: note = MG23-52 RuvC-III domain

SEQ ID NO: 3620 - protein, 139 aa, unidentified; identical to SEQ ID NO: 3578
  REGION 1..139: note = Description of Unknown: uncultivated organism with predicted taxonomy: Butyrivibrio sp. CAG:318
  REGION 1..139: note = MG23-53 RuvC-III domain

SEQ ID NO: 3621 - protein, 139 aa, unidentified; identical to SEQ ID NO: 3579
  REGION 1..139: note = Description of Unknown: uncultivated organism with predicted taxonomy: Butyrivibrio sp. CAG:318
  REGION 1..139: note = MG23-54 RuvC-III domain

SEQ ID NO: 3622 - protein, 139 aa, unidentified; identical to SEQ ID NO: 3578
  REGION 1..139: note = Description of Unknown: uncultivated organism with predicted taxonomy: Butyrivibrio sp. CAG:318
  REGION 1..139: note = MG23-55 RuvC-III domain

SEQ ID NO: 3623 - protein, 139 aa, unidentified; identical to SEQ ID NO: 3579
  REGION 1..139: note = Description of Unknown: uncultivated organism with predicted taxonomy: Butyrivibrio sp. CAG:318
  REGION 1..139: note = MG23-56 RuvC-III domain

SEQ ID NO: 3624 - protein, 139 aa, unidentified; identical to SEQ ID NO: 3578
  REGION 1..139: note = Description of Unknown: uncultivated organism with predicted taxonomy: Butyrivibrio sp. CAG:318
  REGION 1..139: note = MG23-57 RuvC-III domain

SEQ ID NO: 3625 - protein, 139 aa, unidentified; identical to SEQ ID NO: 3579
  REGION 1..139: note = Description of Unknown: uncultivated organism with predicted taxonomy: Butyrivibrio sp. CAG:318
  REGION 1..139: note = MG23-58 RuvC-III domain

SEQ ID NO: 3626 - protein, 139 aa, unidentified; identical to SEQ ID NO: 3580
  REGION 1..139: note = Description of Unknown: uncultivated organism with predicted taxonomy: Clostridiales
  REGION 1..139: note = MG23-59 RuvC-III domain

SEQ ID NO: 3627 - protein, 139 aa, unidentified; identical to SEQ ID NO: 3585
  REGION 1..139: note = Description of Unknown: uncultivated organism with predicted taxonomy: Clostridiales
  REGION 1..139: note = MG23-60 RuvC-III domain

SEQ ID NO: 3628 - protein, 139 aa, unidentified; identical to SEQ ID NO: 3601
  REGION 1..139: note = Description of Unknown: uncultivated organism with predicted taxonomy: Butyrivibrio sp. CAG:318
  REGION 1..139: note = MG23-62 RuvC-III domain

SEQ ID NO: 3629 - protein, 139 aa, unidentified; identical to SEQ ID NO: 3579
  REGION 1..139: note = Description of Unknown: uncultivated organism with predicted taxonomy: Butyrivibrio sp. CAG:318
  REGION 1..139: note = MG23-63 RuvC-III domain

SEQ ID NO: 3630 - protein, 139 aa, unidentified; identical to SEQ ID NO: 3591
  REGION 1..139: note = Description of Unknown: uncultivated organism with predicted taxonomy: Clostridiales
  REGION 1..139: note = MG23-64 RuvC-III domain

SEQ ID NO: 3631 - protein, 139 aa, unidentified; identical to SEQ ID NO: 3577
  REGION 1..139: note = Description of Unknown: uncultivated organism with predicted taxonomy: Clostridiales
  REGION 1..139: note = MG23-65 RuvC-III domain

SEQ ID NO: 3632 - protein, 139 aa, unidentified
  REGION 1..139: note = Description of Unknown: uncultivated organism with predicted taxonomy: Butyrivibrio sp. CAG:318
  REGION 1..139: note = MG23-66 RuvC-III domain
VETRQGTKAITQILKQAFPNTQIVFVKAGIVSDFRKKFDINKVRALNDTHHAKDAYLNIVVGNTYYTKFTNNPMNFIKDARKNPKNDFYRYNMDKIFDYNVIRNGEEAWISDNGKTKQHVLRIMKKNSVTITVKTEEAH

SEQ ID NO: 3633 - protein, 139 aa, unidentified; identical to SEQ ID NO: 3579
  REGION 1..139: note = Description of Unknown: uncultivated organism with predicted taxonomy: Butyrivibrio sp. CAG:318
  REGION 1..139: note = MG23-67 RuvC-III domain

SEQ ID NO: 3634 - protein, 139 aa, unidentified
  REGION 1..139: note = Description of Unknown: uncultivated organism with predicted taxonomy: Butyrivibrio sp. CAG:318
  REGION 1..139: note = MG23-68 RuvC-III domain
VETRQGTKAITQILKQAFPNTQIVFVKAGIVSDFRKKFDINKVRALNDTHHAKDAYLNIVVGNTYYTKFTNNPMNFIKDARKNPKNDFYRYNMDKIFDYNVIRNGEEAWIADNGKTKQHVLQIMKKNSVTITVKTEEYH

SEQ ID NO: 3635 - protein, 139 aa, unidentified; identical to SEQ ID NO: 3578
  REGION 1..139: note = Description of Unknown: uncultivated organism with predicted taxonomy: Butyrivibrio sp. CAG:318
  REGION 1..139: note = MG23-69 RuvC-III domain

SEQ ID NO: 3636 - protein, 139 aa, unidentified; identical to SEQ ID NO: 3592
  REGION 1..139: note = Description of Unknown: uncultivated organism with predicted taxonomy: Butyrivibrio sp. CAG:318
  REGION 1..139: note = MG23-70 RuvC-III domain

SEQ ID NO: 3637 - protein, 139 aa, unidentified
  REGION 1..139: note = Description of Unknown: uncultivated organism with predicted taxonomy: Eubacterium
  REGION 1..139: note = MG23-72 RuvC-III domain
VETRQGTKAITQILKQAFPDTQIIFVKAGVVSDFRKKFNINKVRALNDTHHAKDAYLNIVVGNIYNTKFTSNPINFIKDARKNVNDVSYKYNMDKMFDYNVCRNGENAWIADNGKSKQHVLSVLGKNSVIITRKTEENH

SEQ ID NO: 3638 - protein, 162 aa, unidentified
  REGION 1..162: note = Description of Unknown: uncultivated organism with predicted taxonomy: Candidatus Melainabacteria
  REGION 1..162: note = MG1-4 HNH domain
DNSLYGSKKAQDTERFMKQQEKENEQIINELKDAGLYVNGQNHANATYFLMHKLLKSQGGKCIYSGQNISPSNYDECEIDHIYPRTLGGNDALYNKVVCYRRENQDKKGRTPYEWLSPDSDKWANYVNRLNKIKKQLGKKKFELLTSKPEDCEKLIESYNGL

SEQ ID NO: 3639 - protein, 158 aa, unidentified
  REGION 1..158: note = Description of Unknown: uncultivated organism with predicted taxonomy: Verrucomicrobia
  REGION 1..158: note = MG1-5 HNH domain
DDFLGSKAKKEMSQGIKKRFEEKKKLAEELDSQRAEFGNKYASKKMLLKFELYKKQRGRCVYTDNALPLSELENLEVEHIFPRSRGGADAMYNYVLTDENTNKQKGDKTPFEWLSSDKTKWESYCDRVRSLTQSLGAKRCKLLVSPNAEELMQKYTAL

SEQ ID NO: 3640 - protein, 152 aa, unidentified
  REGION 1..152: note = Description of Unknown: uncultivated organism with predicted taxonomy: unclassified Verrucomicrobia (miscellaneous)
  REGION 1..152: note = MG1-6 HNH domain
DDFMGEKEKKEMRIAMKKRAEEKMMIAKDLDEHGFKGGNLLLKMELYRKQNGICLYTGDALPLSELATLEIEHIVPRSRGGPDAQYNYVITREKTNKLKGDKTPYEWLSSDAKEWASYTDRVNACAKALGKKRCRLLLEKDAEELVEKYTAL

SEQ ID NO: 3641 - protein, 152 aa, unidentified
  REGION 1..152: note = Description of Unknown: uncultivated organism with predicted taxonomy: unclassified Verrucomicrobia (miscellaneous)
  REGION 1..152: note = MG1-7 HNH domain
EDFMGKEQKKRMQIEMKKRASEKMLIAKKLDEAGYKGGNLLLKMELLEKQGGVCLYTGEPLLPSELGVLEIEHIVPRSRGGPDAQYNYVLTREKTNKEKADRTPFEWLSSDPVKWAGYSDRVKARAGQLGRKRCELLLEKNAEELVEKYTAL

SEQ ID NO: 3642 - protein, 153 aa, unidentified
  REGION 1..153: note = Description of Unknown: uncultivated organism
  REGION 1..153: note = MG1-1 HNH domain
EDFMGEEAKREYQNFINEREKDRKAAREEAGKLGFDSRSSGLRYELWKAQGCCCLYTGRALAETELDQYEIDHIVPRSLGGPDAIVNYALTFHDINHTKEKGKLTPFTLLHGKPGWAEYLLRVDARATFLRNKKVQLLTRPDAAELVQRYTAL

SEQ ID NO: 3643 - protein, 151 aa, unidentified
  REGION 1..151: note = Description of Unknown: uncultivated organism with predicted taxonomy: Verrucomicrobia
  REGION 1..151: note = MG1-2 HNH domain
EDFMGEKAKIEYRKFLNRREKERKEAREQAGQLGATSGSSGLKMELFKAQRGQCLYSGQRLHETKIEDYVIEHIVPRAKRGPDAVINYVLTTEELNNDKSDHIPFEWPYLKKQWDAYTQRVESCAGALGVKRVRLLVSPDAVELAQKYTAL

SEQ ID NO: 3644 - protein, 167 aa, unidentified
  REGION 1..167: note = Description of Unknown: uncultivated organism
  REGION 1..167: note = MG1-3 HNH domain
DPPRNARQRAERQKEIEANREKREKLFEQYGIEDSGVASKRRRIMLYEQQRGKCPYTGRDLPSNPLDPSLEIEHIFPVEMGGLSVDDNLVLTWRSVNAEKGKRTPLQWAGERFDAMLANTRDMRWSARKREIFAWGTIREDKPDKPSHYNADGTLRVPDFGNTTRTA

SEQ ID NO: 3645 - protein, 167 aa, unidentified; identical to SEQ ID NO: 3644
  REGION 1..167: note = Description of Unknown: uncultivated organism
  REGION 1..167: note = MG1-13 HNH domain

SEQ ID NO: 3646 - protein, 153 aa, unidentified
  REGION 1..153: note = Description of Unknown: uncultivated organism
  REGION 1..153: note = MG1-8 HNH domain
EDFMGEQAKRELQTFQKRREQARAEAEAEAAKLGLESRSSALRYELFKAQGGICLYTGRPLSETQLDQYEIDHIVPRSLGGPDAMVNYVLTFPEVNSAKEKGKLTPYALLHGTDGWDAYVARVKARAAALRNKKVQLLTREDAPELVERYTAL

SEQ ID NO: 3647 - protein, 160 aa, unidentified
  REGION 1..160: note = Description of Unknown: uncultivated organism with predicted taxonomy: Verrucomicrobia
  REGION 1..160: note = MG1-9 HNH domain
DDKDNSLEGRKRTEAIQQALRENEQRRDKARKALEQCGLPTTDDMVVRWLLREAQGGVCIYTSNEIRPADLPNLQIEHIVPRSRGGPDAFWNWVLCDENANAEKGDRVPYVWFKEEKTDEEWADYKRRVLARAAHLGRRKVDLLLRPDAAELAGEKYTAL

SEQ ID NO: 3648 - protein, 166 aa, unidentified
  REGION 1..166: note = Description of Unknown: uncultivated organism
  REGION 1..166: note = MG1-10 HNH domain
QAPRTETQKKEIEVEQKNNRASKDKMASEFGVGEGKLGRSKYFRIALWKQQGGSKTTKAICPFTGKTLDVDDPLSPQLELAHLYPDTKGGLYMMDNLVLTTREVNKAMDNMTPVEAARAGIFGISCDEMIRRSEQFAWGESKRKLFRFEPTAEESFPDFNNMTRIS

SEQ ID NO: 3649 - protein, 166 aa, unidentified
  REGION 1..166: note = Description of Unknown: uncultivated organism
  REGION 1..166: note = MG1-11 HNH domain
NPACNTKQASEIQKQNDARRKRKEELCRAYGCANPTHAEMLRLQLFEEQGGKRKGEAPAICPFTGESLGTDPLSPHLELAHIFPDARGGLYIRENLVLTTARTNRDMNNRTPIEAAEASLPGWSRWETIEQRIRHFRWNAKKLELFTFRPTPEQPIPDFNNMTRTA

SEQ ID NO: 3650 - protein, 161 aa, unidentified
  REGION 1..161: note = Description of Unknown: uncultivated organism
  REGION 1..161: note = MG1-12 HNH domain
DMPRNVVQAKEIQDEQKRRREFKEGLFEKFGVHDKQQDSEARKRVLLYDQQGGNRGEAICPYTGEPLGDPLSPKLQIDHIFPESLGGISEMVNLVLTHETTNNQRKGNQTPYQAFGGQQNTAEWQALVARVQKMGWNKQKRELVLREESSCPEWDNMTRIA

SEQ ID NO: 3651 - protein, 153 aa, unidentified; identical to SEQ ID NO: 3642
  REGION 1..153: note = Description of Unknown: uncultivated organism
  REGION 1..153: note = MG1-14 HNH domain

SEQ ID NO: 3652 - protein, 157 aa, unidentified
  REGION 1..157: note = Description of Unknown: uncultivated organism
  REGION 1..157: note = MG1-20 HNH domain
DFSTKDSKKKYENDSKTNNKLFLEAKKKLRDNFGIDYRKQNENLVRKYMMWEKQGHICPYTGQPLDFEKLPEYEIEHIIPRGNKWNGPDDIKNTVLTTSAENRRKGENMPFEYIKNEEWESFKNRVNNMNISGKTKNILLARTEEEVEKLINRYYGL

SEQ ID NO: 3653 - protein, 157 aa, unidentified; identical to SEQ ID NO: 3652
  REGION 1..157: note = Description of Unknown: uncultivated organism with predicted taxonomy: Candidatus Peregrinibacteria bacterium CG10_big_fil_rev_8_21_14_0_10_54_7
  REGION 1..157: note = MG1-21 HNH domain

SEQ ID NO: 3654 - protein, 157 aa, unidentified; identical to SEQ ID NO: 3652
  REGION 1..157: note = Description of Unknown: uncultivated organism with predicted taxonomy: Candidatus Peregrinibacteria bacterium CG10_big_fil_rev_8_21_14_0_10_54_7
  REGION 1..157: note = MG1-22 HNH domain

SEQ ID NO: 3655 - protein, 155 aa, unidentified
  REGION 1..155: note = Description of Unknown: uncultivated organism with predicted taxonomy: Candidatus Melainabacteria bacterium
  REGION 1..155: note = MG1-23 HNH domain
DNSLFGAKKANDTLKVMKENEKDNEQIVSELKDANALSSENILKLKLLKKQGLKCIYSGKSIAISNFDACEIDHIYPRSMGGNDALYNKVLCYSMENQKKAGRTPYEWLHKDEKTWFDFVNRLEAIKDTLGKKKYELLTSKPEDCKILIDSYNGL

SEQ ID NO: 3656 - protein, 155 aa, unidentified
  REGION 1..155: note = Description of Unknown: uncultivated organism
  REGION 1..155: note = MG1-24 HNH domain
DNSLFGKAKAQAAETNMREMEKRNQQLIEELKNYDAYSSKNFEKLKLLKIQCGQCAYSGEKIGIGDFNKCEIDHIYPRAMGGNDALYNKVLCYRVENQKKQDRTPYEWLSSNKEQWANYVFRLNKIKQSLGKKKFELLTSKPEDCAKLIDSYNGL

SEQ ID NO: 3657 - protein, 155 aa, unidentified
  REGION 1..155: note = Description of Unknown: uncultivated organism
  REGION 1..155: note = MG1-25 HNH domain
DNSLFGAKKTQEYISNINKNQKENEEIAQQLKDANCFSSKNLEKLKLLQKQGGHCIYSGRPIAISNLEECEIDHIYPRSRGGNDALSNKVLCYAIENQNKKEQTPYEWLHNNEHSWNEFVKRVTNKQEALGKIKVKLLISKPEDSEKLIKSYNGL

SEQ ID NO: 3658 - protein, 162 aa, unidentified
  REGION 1..162: note = Description of Unknown: uncultivated organism
  REGION 1..162: note = MG1-26 HNH domain
DNSLYGSKKAQDTEKYMKQQEKENEQIIKELKEAGLYVNGQNHANATYFLMHKLLKSQGGACAYSGQKIAPSNYDECEIDHIYPRTLGGNDALYNKVVCYRRENQDKKGRTPYEWLSSDNDKWANYVNRLNKIKKQLGKKKFELLTSKPEDCEKLIESYNGL

SEQ ID NO: 3659 - protein, 155 aa, unidentified
  REGION 1..155: note = Description of Unknown: uncultivated organism
  REGION 1..155: note = MG1-27 HNH domain
DNSLYGAKKAQDFLKTIKENEKTNNDLAIELKNADCFSVVNLEKLKLLKQQDGICIYCGQRIGISDLDKCEIDHIYPRSRGGNDAISNKVLCYSIENQKKKDRTPYEWLHNDERTWADFVNRAKLLKDKLKKTKYTLLTSKPENCEELIKSYNGL

SEQ ID NO: 3660 - protein, 155 aa, unidentified
  REGION 1..155: note = Description of Unknown: uncultivated organism
  REGION 1..155: note = MG1-28 HNH domain
DNSLFGKAKAQAAETNMKAMEKQNQQLVKELKNYDAYSSINFEKLKLLKMQCGQCAYSGQKIGISDFDKCEIDHIYPRTMGGNDALYNKVLCYRVENQKKQGRIPYEWLSSDKEKWANYVFRLNEIKKSLGKKKFELLTSKPEDCEKLIDSYNGL

SEQ ID NO: 3661 - protein, 155 aa, unidentified; identical to SEQ ID NO: 3656
  REGION 1..155: note = Description of Unknown: uncultivated organism
  REGION 1..155: note = MG1-29 HNH domain

SEQ ID NO: 3662 - protein, 155 aa, unidentified; identical to SEQ ID NO: 3660
  REGION 1..155: note = Description of Unknown: uncultivated organism
  REGION 1..155: note = MG1-30 HNH domain

SEQ ID NO: 3663 - protein, 155 aa, unidentified; identical to SEQ ID NO: 3659
  REGION 1..155: note = Description of Unknown: uncultivated organism
  REGION 1..155: note = MG1-31 HNH domain

SEQ ID NO: 3664 - protein, 155 aa, unidentified
  REGION 1..155: note = Description of Unknown: uncultivated organism
  REGION 1..155: note = MG1-32 HNH domain
DNSLYGAKKAQDFLKTIKENEKTNNDLAIELKNADCFSVVNLEKLKLLKQQDGICIYCGQRIGISDLDKCEIDHIYPRSRGGNDAISNKVLCYSIENQKKKDRTPYEWLHNDERTWADFVNRAKLLKDKLKKTKYTLLTSNPENCKELIKSYNGL

SEQ ID NO: 3665 - protein, 155 aa, unidentified; identical to SEQ ID NO: 3659
  REGION 1..155: note = Description of Unknown: uncultivated organism
  REGION 1..155: note = MG1-33 HNH domain

SEQ ID NO: 3666 - protein, 162 aa, unidentified; identical to SEQ ID NO: 3658
  REGION 1..162: note = Description of Unknown: uncultivated organism with predicted taxonomy: Candidatus Gastranaerophilales bacterium HUM_9
  REGION 1..162: note = MG1-34 HNH domain

SEQ ID NO: 3667 - protein, 155 aa, unidentified; identical to SEQ ID NO: 3657
  REGION 1..155: note = Description of Unknown: uncultivated organism
  REGION 1..155: note = MG1-35 HNH domain

SEQ ID NO: 3668 - protein, 157 aa, unidentified
  REGION 1..157: note = Description of Unknown: uncultivated organism with predicted taxonomy: Clostridium
  REGION 1..157: note = MG1-36 HNH domain
ELGKGKSEREKIKKQKQENLGKTSRIKEELQAQGIENPTGTEITKYKLWKEQTNYCMYSGKKIDIEQVFSSETQINYIIPFWMCFDDTYKNKILTFTSEVKQKQDLMPYQYIQKMRRDTEEYETRISMLIRVYSKKNRLVKKNITKEEMIKWRNRNI

SEQ ID NO: 3669 - protein, 155 aa, unidentified; identical to SEQ ID NO: 3657
  REGION 1..155: note = Description of Unknown: uncultivated organism
  REGION 1..155: note = MG1-37 HNH domain

SEQ ID NO: 3670 - protein, 155 aa, unidentified; identical to SEQ ID NO: 3655
  REGION 1..155: note = Description of Unknown: uncultivated organism with predicted taxonomy: Candidatus Melainabacteria bacterium
  REGION 1..155: note = MG1-38 HNH domain

SEQ ID NO: 3671 - protein, 155 aa, unidentified; identical to SEQ ID NO: 3659
  REGION 1..155: note = Description of Unknown: uncultivated organism
  REGION 1..155: note = MG1-39 HNH domain

SEQ ID NO: 3672 - protein, 155 aa, unidentified; identical to SEQ ID NO: 3664
  REGION 1..155: note = Description of Unknown: uncultivated organism
  REGION 1..155: note = MG1-40 HNH domain

SEQ ID NO: 3673 - protein, 162 aa, unidentified; identical to SEQ ID NO: 3658
  REGION 1..162: note = Description of Unknown: uncultivated organism with predicted taxonomy: Candidatus Gastranaerophilales bacterium HUM_9
  REGION 1..162: note = MG1-41 HNH domain

SEQ ID NO: 3674 - protein, 155 aa, unidentified; identical to SEQ ID NO: 3659
  REGION 1..155: note = Description of Unknown: uncultivated organism
  REGION 1..155: note = MG1-42 HNH domain

SEQ ID NO: 3675 - protein, 155 aa, unidentified; identical to SEQ ID NO: 3659
  REGION 1..155: note = Description of Unknown: uncultivated organism
  REGION 1..155: note = MG1-43 HNH domain

SEQ ID NO: 3676 - protein, 155 aa, unidentified; identical to SEQ ID NO: 3660
  REGION 1..155: note = Description of Unknown: uncultivated organism
  REGION 1..155: note = MG1-44 HNH domain

SEQ ID NO: 3677 - protein, 162 aa, unidentified; identical to SEQ ID NO: 3658
  REGION 1..162: note = Description of Unknown: uncultivated organism with predicted taxonomy: Candidatus Melainabacteria
  REGION 1..162: note = MG1-45 HNH domain

SEQ ID NO: 3678 - protein, 155 aa, unidentified; identical to SEQ ID NO: 3660
  REGION 1..155: note = Description of Unknown: uncultivated organism
  REGION 1..155: note = MG1-46 HNH domain

SEQ ID NO: 3679 - protein, 155 aa, unidentified; identical to SEQ ID NO: 3659
  REGION 1..155: note = Description of Unknown: uncultivated organism
  REGION 1..155: note = MG1-47 HNH domain

SEQ ID NO: 3680 - protein, 155 aa, unidentified
  REGION 1..155: note = Description of Unknown: uncultivated organism
  REGION 1..155: note = MG1-48 HNH domain
DNSLYGAKKANGYLKNIKENEKENNEIKKELEEANAYSPTNFEKLKLLRMQCGKCVYSGKNISINDFDSCEIDHVYPRTMGGNDALYNRVLCYSIENQNKAGRTPYEWLSSDKELWANYVARLNDIKGSLGKKKFELLTSKPEVCEKLIESYNGL

SEQ ID NO: 3681 - protein, 153 aa, unidentified
  REGION 1..153: note = Description of Unknown: uncultivated organism
  REGION 1..153: note = MG1-49 HNH domain
DNSLFGAEKAKATEQMMRINEKKNEEIRNNLSDDYSAINFLKYKLAEMQDWTCIYSGRKIEITDFDACEIDHIFPRTDDTNDALYNKVICYKEEIADKHGRTPYEWMNNNTARWQEYIMRVKSLSQKSGKTKTALLTLSPTQSEKFLEKRKAL

SEQ ID NO: 3682 - protein, 153 aa, unidentified; identical to SEQ ID NO: 3681
  REGION 1..153: note = Description of Unknown: uncultivated organism
  REGION 1..153: note = MG1-50 HNH domain

SEQ ID NO: 3683 - protein, 154 aa, unidentified
  REGION 1..154: note = Description of Unknown: uncultivated organism with predicted taxonomy: Candidatus Melainabacteria bacterium
  REGION 1..154: note = MG1-51 HNH domain
DNSLYGAQKANNYLISIKANEKENNEIKKELEDANAYSNTNFDKLKLLRMQGGRCIYSGEKIGISNFEQCDIDHIFPRSRGGNDALYNKVLCYSKENRIKGDKVPYEWLNNTENWDIYLQRTRDLKGSLGKKKFELLTSKPDQCEKLIESYNGL

SEQ ID NO: 3684 - protein, 155 aa, unidentified
  REGION 1..155: note = Description of Unknown: uncultivated organism
  REGION 1..155: note = MG1-52 HNH domain
DNSLYGAKKSNDYLKNIKENEKENLEIKKELEDVDRYSPTNFEKLKLLRMQGGKCIYSGKPICIDDFDKCEIDHIYPRTMGGNDALYNRVLCYSIENQNKKGRTPYEWLSNDKEYWSAYVDRLNKIKGSLGKKKFELLTSKPEDCEKLIESYNGL

SEQ ID NO: 3685 - protein, 153 aa, unidentified; identical to SEQ ID NO: 3681
  REGION 1..153: note = Description of Unknown: uncultivated organism
  REGION 1..153: note = MG1-53 HNH domain

SEQ ID NO: 3686 - protein, 153 aa, unidentified; identical to SEQ ID NO: 3681
  REGION 1..153: note = Description of Unknown: uncultivated organism
  REGION 1..153: note = MG1-54 HNH domain

SEQ ID NO: 3687 - protein, 153 aa, unidentified; identical to SEQ ID NO: 3681
  REGION 1..153: note = Description of Unknown: uncultivated organism
  REGION 1..153: note = MG1-55 HNH domain

SEQ ID NO: 3688 - protein, 155 aa, unidentified
  REGION 1..155: note = Description of Unknown: uncultivated organism
  REGION 1..155: note = MG1-56 HNH domain
DNSLEGQKRAKDTENYMKAQAKENEQIKKELEEQNALSGINFEKLKLLKMQGGKCIYSGQNIGISDFDKCEIDHIYPRTMGGNDALYNRVLCYRIENQDKKGRTPYEWLSHDEEQWAAYVHRLSEIKQILGKKKFELLTSKPEDCAKIIDSYNGL

SEQ ID NO: 3689 - protein, 153 aa, unidentified
  REGION 1..153: note = Description of Unknown: uncultivated organism
  REGION 1..153: note = MG1-57 HNH domain
DNSLFGAEKAKATEQMMKNNEKKNEEIKKNLGDDYSAINFLKYKLAEMQDWKCIYSGRKIGITDFAACEIDHIFPRTDDGNDALYNKVICYKEENADKLGRTPYEWLYHNIARWQEYVTRVKSLSQKLGKTKTALLTLPPEQSEKLLEKKNAL

SEQ ID NO: 3690 - protein, 185 aa, unidentified
  REGION 1..185: note = Description of Unknown: uncultivated organism with predicted taxonomy: Candidatus Termititenax aidoneus
  REGION 1..185: note = MG1-58 HNH domain
DNSVLSGAKAEGYKLLCEQNYAKNEKLKNDLGDDFSPQNLIKLKLLESQNFQCIYSGNNIAPTDLDACEIDHIYPRTMGGNDALYNKVLCYSIENQNKKGRTPYEWFHQEKTEEEWIEYKNRCFNFLNKYPIPKKVKRRQDNHISKSIKEYYVKLSEYKLAKKKFELLTSKPEDCEKLIESYNGL

SEQ ID NO: 3691 - protein, 158 aa, unidentified
  REGION 1..158: note = Description of Unknown: uncultivated organism with predicted taxonomy: Verrucomicrobia
  REGION 1..158: note = MG1-59 HNH domain
DDFLGKKAKSDLNKAIKTRFDEKKKLAEDLDSKREEFGFKYASKKMLLKFELYKKQGGECVYTGNALPLSELESLEIEHIVPRSRGGPDAMYNYVLTDEKTNKEKGDRTPFEWRSTMGAEWESYCERVRKLTKELGAKRCKLLLSPNAAELVEKYTAF

SEQ ID NO: 3692 - protein, 152 aa, unidentified
  REGION 1..152: note = Description of Unknown: uncultivated organism with predicted taxonomy: unclassified Verrucomicrobia (miscellaneous)
  REGION 1..152: note = MG1-60 HNH domain
DDFMGEKEKKEMRIAMKKRAEEKMRIAKDLDEHGFKGGNLLLKMELYRKQNGICLYTGDALPLSELATLEIEHIVPRSRGGPDAQYNYVITREKTNKLKGDKTPYEWLSSDAKEWASYTDRVNACAKALGKKRCRLLLEKDAEELVEKYTAL

SEQ ID NO: 3693 - protein, 150 aa, unidentified
  REGION 1..150: note = Description of Unknown: uncultivated organism
  REGION 1..150: note = MG1-61 HNH domain
EGFYGEKRRKEIIFEQNKKRKENDLAFEDAKKIGLKGKDAVLKIKLHKEQGGFDIYDGNPIKDNEIDNYEIDHIVPRESGGPDSYINKVLTSRKNNEEKGKRTPYEWLKDKNYWNDYVKRIKDSKTLNDKKKTLLTSSEAVNLAEKYTQL

SEQ ID NO: 3694 - protein, 150 aa, unidentified; identical to SEQ ID NO: 3693
  REGION 1..150: note = Description of Unknown: uncultivated organism with predicted taxonomy: Deltaproteobacteria
  REGION 1..150: note = MG1-62 HNH domain

SEQ ID NO: 3695 - protein, 160 aa, unidentified
  REGION 1..160: note = Description of Unknown: uncultivated organism with predicted taxonomy: Verrucomicrobia bacterium 61-8
  REGION 1..160: note = MG1-63 HNH domain
DDKDNSLEGRKRTEAIQQALRENEQRRDKARKALEQCGLPTTDDMVVRWLLLEAQGPACIYTNKPIRCTDLPNLQIEHIVPRALGGPDAFWNWVLSDENANAEKGDRVPYVWFKEEKTDEEWADYKRRVLARAAHLGRRKVDLLLRPDAAELAGEKYTAL

SEQ ID NO: 3696 - protein, 160 aa, unidentified
  REGION 1..160: note = Description of Unknown: uncultivated organism
  REGION 1..160: note = MG1-64 HNH domain
DDKDNSLEGRKRTEAIQQALRENEQRRDKARKALEQCGLPTTDDMVVRWLLREAQGGVCIYTSNEIRPADLPNLQIEHIVPRSRGGPDAFWNWVLCDENANAEKGDRVPYVWFKEEKTDEEWADYKRRVLARAAQLGRRKADLHLRPDAAELAGEKYTAL

SEQ ID NO: 3697 - protein, 175 aa, unidentified
  REGION 1..175: note = Description of Unknown: uncultivated organism with predicted taxonomy: Verrucomicrobia
  REGION 1..175: note = MG1-65 HNH domain
EDFLGEEAKKKIQKIQNENKKLNSQAAEKVEELKLAGRQSILKYKLWQLQGGICLYTGKPIAQTEIESHEVEHIVPRNHPQTQGPDAQWNLVLTAREINDRKANRTPFEWFQQDPIAFQWPMGQPDASIPSQEKQRLWEAYCDRIKQRKKNLGNKRVKLLLSDKAPELVERYETL

SEQ ID NO: 3698 - protein, 163 aa, unidentified
  REGION 1..163: note = Description of Unknown: uncultivated organism
  REGION 1..163: note = MG1-66 HNH domain
ETLDSKGRKERYKKVQDANRKAKEEAKKNLRELRNNGISIDGENALLKVRLWQEQNGRDLYTGLPIGQTEISICEIDHIIPREMGGPNAMYNFVLTKPECNREKGKRTPYQWLGSDPEKWQMFVDRINSEEYKKLSDRKKELLLKTITDEDELKELVEKYTHL

SEQ ID NO: 3699 - protein, 160 aa, unidentified
  REGION 1..160: note = Description of Unknown: uncultivated organism
  REGION 1..160: note = MG1-67 HNH domain
DDKDNSLEGRKRTEAIQQALRENEQRRDKARKALEQCGLPTTDDMVVRWLLLEAQGPACIYTNKPIRCTDLPNLQIEHIVPRSFGGPDAFWNWVLCDENANAEKGDRVPYVWFKEEKTDEEWADYKRRVLARAAQLGRRKVDLLLRPDAAELAGEKYTAL

SEQ ID NO: 3700 - protein, 150 aa, unidentified
  REGION 1..150: note = Description of Unknown: uncultivated organism with predicted taxonomy: Elusimicrobia bacterium HGW-Elusimicrobia-1
  REGION 1..150: note = MG1-68 HNH domain
DGFYGKIKKKKIIAEQNKNRKESDLAFKEAQTLGLKGGESILKIKLYREQGGFDLYDGKTIKDTEIDNYEIDHIVPREDGGPDSYINKVLTSRKNNDDKGKRTPYEWLSKSDNWEEYFERVKKLPKDSKKKKDLLVSANAKELVEKYTQL

SEQ ID NO: 3701 - protein, 168 aa, unidentified
  REGION 1..168: note = Description of Unknown: uncultivated organism with predicted taxonomy: Pedosphaera sp. Tous-C6FEB
  REGION 1..168: note = MG1-69 HNH domain
EDFMGEEAKRRLQTFQRQREEERKKARSIAAQAGAESALSALKCQLWEAQGGECLNGREVLDQTGQSKARCLYRQTALPLSRLDEYVIDHIVPRARGGPEAMVNYVLTTAETNEAKGDRTPFEWLHGSPDWDAYVARVKARAAALRNKKVQLLTREDAPELVERYTAL

SEQ ID NO: 3702 - protein, 158 aa, unidentified
  REGION 1..158: note = Description of Unknown: uncultivated organism with predicted taxonomy: Endomicrobium
  REGION 1..158: note = MG1-70 HNH domain
ETLETSKRKDYKKIQKFNLKAKEKAKQILEELRSKGISMQGSNKVLKVRLWQEQGGFDVYTGQPIGETEIDICEIDHIVPREMGGPNARYNMVLTKPECNREKGKRTPYQWLGQDPEEWQKFVERLEREKGFENLPAKKKNLLVATNPEELIERYTHL

SEQ ID NO: 3703 - protein, 175 aa, unidentified; identical to SEQ ID NO: 3697
  REGION 1..175: note = Description of Unknown: uncultivated organism
  REGION 1..175: note = MG1-71 HNH domain

SEQ ID NO: 3704 - protein, 153 aa, unidentified
  REGION 1..153: note = Description of Unknown: uncultivated organism with predicted taxonomy: Deltaproteobacteria
  REGION 1..153: note = MG1-72 HNH domain
EDFMGEQAKRELQTFQKRREQARAEAEAEAAKLGLESRSSSLRYELFKAQGGICLYTGRTLSETQLDQYEIDHIVPRSLGGPDAMVNYVLTFPEVNSAKEKGKLTPYALLHGTDGWDAYVARVKARAAALRNKKVQLLTREDAPQLVERYTAL

SEQ ID NO: 3705 - protein, 160 aa, unidentified; identical to SEQ ID NO: 3647
  REGION 1..160: note = Description of Unknown: uncultivated organism with predicted taxonomy: Pedosphaera sp. Tous-C6FEB
  REGION 1..160: note = MG1-73 HNH domain

SEQ ID NO: 3706 - protein, 175 aa, unidentified; identical to SEQ ID NO: 3697
  REGION 1..175: note = Description of Unknown: uncultivated organism
  REGION 1..175: note = MG1-74 HNH domain

SEQ ID NO: 3707 - protein, 153 aa, unidentified
  REGION 1..153: note = Description of Unknown: uncultivated organism
  REGION 1..153: note = MG1-75 HNH domain
DIPRNEKERREKEQEIRKNQGRKEKLFERFNAADSAVGSAYKRVLLFDQQRGLCPYSGGELGDPLSSDLEIDHIFPRKRGGISVRENLVLTFADRNRDKGNLTPREAARKRNGWDWDEIEAATARMKWSRKKREIFEREGAGIPPLANVTRTA

SEQ ID NO: 3708 - protein, 156 aa, unidentified
  REGION 1..156: note = Description of Unknown: uncultivated organism
  REGION 1..156: note = MG1-76 HNH domain
ELLAGEERKKKYLKLQKENRQKKEKAEKIYQELKNGNVNLKGRSILLKIQLWQEQNGIDPYSGEQIPQTKINLYEIDHIVPREMGGSDAYFNKVLTSPEKNREKAKRTPYQMFKGNISDWKKYLNTIEKITNLSKKKRALLTSENPEELIERYTHL

SEQ ID NO: 3709 - protein, 137 aa, unidentified
  REGION 1..137: note = Description of Unknown: uncultivated organism
  REGION 1..137: note = MG1-77 HNH domain
EDFMGEQAKRDLQSFQKRREQARAEAEAEAAKLGLGSRSRALRYELFKAQGGICLYTGRPLSETQLDQYEIDHIVPRSLGGPDAMVNYVLTFPEVNSAKEKGKLTPYALLHGTPHWDAYVARVKARAATLRNKKVQL

SEQ ID NO: 3710 - protein, 151 aa, unidentified
  REGION 1..151: note = Description of Unknown: uncultivated organism with predicted taxonomy: Verrucomicrobia
  REGION 1..151: note = MG1-78 HNH domain
EDFMGRKAKQEYLKFQRERAKERSEAREEAAKAGATEGAAGLKMELYKAQGGICLYTGEALSVTSLDEYVIDHIVPRAKGGPDSVMNYVLTTRRANDDKLDRTPYEWLSQTPGWDAYVERVKERAVTLRNKKVSLLTRPDADTLVDKYTAL

SEQ ID NO: 3711 - protein, 157 aa, unidentified
  REGION 1..157: note = Description of Unknown: uncultivated organism
  REGION 1..157: note = MG1-79 HNH domain
EIPKNQKEKKEFQDEIKANRSRKTDIIEKKYGLKLDSLSDWQVKQVLLFDQQANEEGEAFSPYSGVSLGTNPLAHDLEVEHIYPERRGGISVMDNLVITWRTENQTKGDRTPWEWAKDEGWRVDVHLQKMHWSANKRALFVRQESDPPQWDNTTRMA

SEQ ID NO: 3712 - protein, 151 aa, unidentified
  REGION 1..151: note = Description of Unknown: uncultivated organism with predicted taxonomy: Verrucomicrobia
  REGION 1..151: note = MG1-80 HNH domain
EDFMGRKAKQEYLKFQRERAKERSEAREEAAKAGATEGAAGLKMELYKAQGGICLYTGEALSVTSLDEYVIDHIVPRAKGGPDSVMNYVLTTRRANDDKLDRMPYEWLSQTPGWDAYVERVKERAVTLRNKKVSLLTRPDADTLVDKYTAL

SEQ ID NO: 3713 - protein, 152 aa, unidentified
  REGION 1..152: note = Description of Unknown: uncultivated organism
  REGION 1..152: note = MG1-81 HNH domain
SLALGEKNKRELLKRNKANRDQRESIRQELASRNASTSRNAILRYRLWKEALSTCPFCGDKITQEQLLRGEADIEHLVPRSVVDCNEFYNLTVGHVRCNRELKGDRTPFQAFGHTEKWPQLRDNAEKCFKGRKLEIFLSDNAEQLIEQKADL

SEQ ID NO: 3714 - protein, 151 aa, unidentified
  REGION 1..151: note = Description of Unknown: uncultivated organism
  REGION 1..151: note = MG1-82 HNH domain
EDFMGEEAKRRLRSFQRQREAERKRAREETAEAGATEKSAPLKYELLTAQGGLCLYCGQALTLKKLEQYAIDHIVPVGAQGSDALFNKVLAHQECNAAKGKQTPFEWLHGTPGWDAYVARVKARAATLRNKKVQLLTREDAPELVERYTAL

SEQ ID NO: 3715 - protein, 154 aa, unidentified
  REGION 1..154: note = Description of Unknown: uncultivated organism
  REGION 1..154: note = MG1-83 HNH domain
DIPRNQKEKKEFKDEIKANRSRKTDIIEKKYNLKLDSLSDWQVKQVLLFDQQANDDGEAFSPYTGASLGKNPLAHGLEVEHIYPERRGGISIMDNLVITWRTENQTKGDQTPWEWLGQRATAQLQKMHWNRDKRALFVREESEPPQWDNTTRMA

SEQ ID NO: 3716 - protein, 152 aa, unidentified
  REGION 1..152: note = Description of Unknown: uncultivated organism with predicted taxonomy: Coraliomargarita sp. CAG:312
  REGION 1..152: note = MG1-84 HNH domain
EDFMGKQAKKDLSLSMKKRFEEKIDIAKKLDDIGYKGNKMLLKMELLQKQGFACLYTGEALQETDLPILEIEHIVPRSLGGPDAAYNYVLTSESTNKAKGNQTPYKWLSPDRDKWRAYTERVRARAAELGSKRCRLLLSENAEELINKYTAL

SEQ ID NO: 3717 - protein, 152 aa, unidentified; identical to SEQ ID NO: 3692
  REGION 1..152: note = Description of Unknown: uncultivated organism with predicted taxonomy: unclassified Verrucomicrobia (miscellaneous)
  REGION 1..152: note = MG1-85 HNH domain

SEQ ID NO: 3718 - protein, 152 aa, unidentified
  REGION 1..152: note = Description of Unknown: uncultivated organism with predicted taxonomy: Coraliomargarita sp. CAG:312
  REGION 1..152: note = MG1-86 HNH domain
EDFMGKQAKKDLSLSMKKRFEEKIDIAKKLDDIGYKGNKMLLKMELLQKQGFACLYTGEALQETDLPVLEIEHIVPRSLGGPDAAYNYVLTSESTNKAKGNQTPYKWLSPDRDKWRAYTERVRARAAELGSKRCRLLLSENAEELINKYTAL

SEQ ID NO: 3719 - protein, 158 aa, unidentified
  REGION 1..158: note = Description of Unknown: uncultivated organism with predicted taxonomy: Verrucomicrobia
  REGION 1..158: note = MG1-87 HNH domain
DDFLGKKAKSDLNKAIKTRFDEKKKLAEDLDSKREEFGFKYASKKMLLKFELYKKQGGECVYTGNALPLSELESLEIEHIVPRSRGGPDAMYNYVLTDEKTNKEKGDRTPFEWRSTMGAEWESYCERVRKLTKELGAKRCKLLLSPNAAELVEKYTAL

SEQ ID NO: 3720 - protein, 152 aa, unidentified; identical to SEQ ID NO: 3692
  REGION 1..152: note = Description of Unknown: uncultivated organism with predicted taxonomy: unclassified Verrucomicrobia (miscellaneous)
  REGION 1..152: note = MG1-88 HNH domain

SEQ ID NO: 3721 - protein, 152 aa, unidentified; identical to SEQ ID NO: 3692
  REGION 1..152: note = Description of Unknown: uncultivated organism with predicted taxonomy: unclassified Verrucomicrobia (miscellaneous)
  REGION 1..152: note = MG1-89 HNH domain

SEQ ID NO: 3722 - protein, 152 aa, unidentified; identical to SEQ ID NO: 3692
  REGION 1..152: note = Description of Unknown: uncultivated organism with predicted taxonomy: unclassified Verrucomicrobia (miscellaneous)
  REGION 1..152: note = MG1-90 HNH domain

SEQ ID NO: 3723 - protein, 158 aa, unidentified
  REGION 1..158: note = Description of Unknown: uncultivated organism
  REGION 1..158: note = MG1-91 HNH domain
DDFLGKKAKADLSKAINDRAKEKKKYAEELDSQRENFGPKYASKKMLLKYELYSKQKGECIYTGRALGFSDLEQLEVEHIVPRSRGGPDALYNYVLTDEKTNKDKGDRTPFEWLSSKGVEWDAYRDRVRGLTKELGAKRCKLLLSPNAEELVEKYTAL

SEQ ID NO: 3724 - protein, 152 aa, unidentified; identical to SEQ ID NO: 3641
  REGION 1..152: note = Description of Unknown: uncultivated organism with predicted taxonomy: unclassified Verrucomicrobia (miscellaneous)
  REGION 1..152: note = MG1-92 HNH domain

SEQ ID NO: 3725 - protein, 152 aa, unidentified; identical to SEQ ID NO: 3692
  REGION 1..152: note = Description of Unknown: uncultivated organism with predicted taxonomy: unclassified Verrucomicrobia (miscellaneous)
  REGION 1..152: note = MG1-93 HNH domain

SEQ ID NO: 3726 - protein, 158 aa, unidentified
  REGION 1..158: note = Description of Unknown: uncultivated organism with predicted taxonomy: unclassified Verrucomicrobia (miscellaneous)
  REGION 1..158: note = MG1-94 HNH domain
DDFLGSKAKKEMSQGIKKRFEEKKKLAEELDSQRAEFGNKYASKKMLLKFELYKKQRGRCVYTDNALPLSELENLEVEHIFPRSRGGADAMYNYVLTDENTNKQKGDRTPFEWLSSDKTKWESYCDRVRSLTQSLGAKRCKLLVSPNAEELMQKYTAL

SEQ ID NO: 3727 - protein, 152 aa, unidentified
  REGION 1..152: note = Description of Unknown: uncultivated organism with predicted taxonomy: Coraliomargarita sp. CAG:312
  REGION 1..152: note = MG1-95 HNH domain
EDFMGKQAKKDLSLSMKKRFEEKIDIAKKLDDIGYKGNKMLLKMELLQKQGFACLYTGEALQETDLPILEIEHIVPRSLGGPDAAYNYVLTSESTNKAKGNQTPYKWLSPDRDKWRAYTERVRARATELGSKRCRLLLSENAEELINKYTAL

SEQ ID NO: 3728 - protein, 152 aa, unidentified; identical to SEQ ID NO: 3692
  REGION 1..152: note = Description of Unknown: uncultivated organism with predicted taxonomy: unclassified Verrucomicrobia (miscellaneous)
  REGION 1..152: note = MG1-96 HNH domain

SEQ ID NO: 3729 - protein, 152 aa, unidentified; identical to SEQ ID NO: 3692
  REGION 1..152: note = Description of Unknown: uncultivated organism with predicted taxonomy: unclassified Verrucomicrobia (miscellaneous)
  REGION 1..152: note = MG1-97 HNH domain

SEQ ID NO: 3730 - protein, 152 aa, unidentified; identical to SEQ ID NO: 3692
  REGION 1..152: note = Description of Unknown: uncultivated organism with predicted taxonomy: unclassified Verrucomicrobia (miscellaneous)
  REGION 1..152: note = MG1-98 HNH domain

SEQ ID NO: 3731 - protein, 152 aa, unidentified; identical to SEQ ID NO: 3692
  REGION 1..152: note = Description of Unknown: uncultivated organism with predicted taxonomy: unclassified Verrucomicrobia (miscellaneous)
  REGION 1..152: note = MG1-99 HNH domain

SEQ ID NO: 3732 - protein, 152 aa, unidentified; identical to SEQ ID NO: 3716
  REGION 1..152: note = Description of Unknown: uncultivated organism with predicted taxonomy: Coraliomargarita sp. CAG:312
  REGION 1..152: note = MG1-100 HNH domain

SEQ ID NO: 3733 - protein, 152 aa, unidentified
  REGION 1..152: note = Description of Unknown: uncultivated organism with predicted taxonomy: unclassified Verrucomicrobia (miscellaneous)
  REGION 1..152: note = MG1-101 HNH domain
DDFLGEKAKKEYQKAINERFKEKQELAKEMDEAGYKGAKMLLKLELYKKQGGQCVYTGEALPSSEIASLEIEHIVPRSRGGPDSIYNYVLTRESTNKEKADMTPYEWLSRNADRWNAYVSRVNSLYKSLGGKRCKLLLANNAEELVDKYTAL

SEQ ID NO: 3734 - protein, 152 aa, unidentified
  REGION 1..152: note = Description of Unknown: uncultivated organism with predicted taxonomy: unclassified Verrucomicrobia (miscellaneous)
  REGION 1..152: note = MG1-102 HNH domain
DDFMGEKEKKEMRIAMKKRAEEKMRIAKDLDGHGFKGGNLLLKMELYRKQNGICLYTGDALPLSELATLEIEHIVPRSRGGPDAQYNYVITREKTNKLKGDKTPYEWLSSDAKEWASYTDRVNACAKALGKKRCRLLLEKDAEELVEKYAAL

SEQ ID NO: 3735 - protein, 152 aa, unidentified; identical to SEQ ID NO: 3692
  REGION 1..152: note = Description of Unknown: uncultivated organism with predicted taxonomy: Verrucomicrobia
  REGION 1..152: note = MG1-103 HNH domain

SEQ ID NO: 3736 - protein, 152 aa, unidentified; identical to SEQ ID NO: 3716
  REGION 1..152: note = Description of Unknown: uncultivated organism with predicted taxonomy: Verrucomicrobia
  REGION 1..152: note = MG1-104 HNH domain

SEQ ID NO: 3737 - protein, 152 aa, unidentified; identical to SEQ ID NO: 3692
  REGION 1..152: note = Description of Unknown: uncultivated organism
  REGION 1..152: note = MG1-105 HNH domain

SEQ ID NO: 3738 - protein, 158 aa, unidentified
  REGION 1..158: note = Description of Unknown: uncultivated organism with predicted taxonomy: Verrucomicrobia
  REGION 1..158: note = MG1-106 HNH domain
DDFLGKKAKSDLNKAIKTRFDEKKKLAEDLDSKREEFGLKYASKKMLLKFELYKKQGGECVYTGNALPLSELENLEVEHIVPRSRGGPDAMYNYVLTDEKTNKEKGDRTPYEWLSSKGAEWDSYCDRVRELTKNLGAKRCRLLLAPNAAELVEKYTAL

SEQ ID NO: 3739 - protein, 158 aa, unidentified; identical to SEQ ID NO: 3719
  REGION 1..158: note = Description of Unknown: uncultivated organism with predicted taxonomy: Verrucomicrobia
  REGION 1..158: note = MG1-107 HNH domain

SEQ ID NO: 3740 - protein, 158 aa, unidentified
  REGION 1..158: note = Description of Unknown: uncultivated organism with predicted taxonomy: Verrucomicrobia
  REGION 1..158: note = MG1-108 HNH domain
DDFLGKKAKSDLNKAIKTRFDEKKKLAEDLDSKREEFGLKYASKKMLLKFELYKKQGGECVYTGNALPLSELENLEVEHIVPRSRGGPDAMYNYVLTDEKTNKEKGDRTPYEWHSLKGAEWDSYCDRVRELTKNLGAKRCRLLLAPNAAELVEKYTAL

SEQ ID NO: 3741 - protein, 152 aa, unidentified
  REGION 1..152: note = Description of Unknown: uncultivated organism with predicted taxonomy: unclassified Verrucomicrobia (miscellaneous)
  REGION 1..152: note = MG1-109 HNH domain
DDFMGEKEKKEMRSAMKKRAEEKMRIAKDLDEHGFKGGNLLLKMELYRKQNGICLYTGDALPLSELATLEIEHIVPRSRGGPDAQYNYVITREKTNKLKGDKTPYEWLSSDAKEWASYTDRVNACAKALGKKRCRLLLEKDAEELVEKYTAL

SEQ ID NO: 3742 - protein, 158 aa, unidentified
  REGION 1..158: note = Description of Unknown: uncultivated organism with predicted taxonomy: Verrucomicrobia
  REGION 1..158: note = MG1-110 HNH domain
DDFLGKKAKSDLNKAIKTRFDEKKKLAEDLDSKREEFGFKYASKKMLLKFELYKKQGGECVYTGKALPLSELESLEIEHIVPRSRGGPDAMYNYVLTDEKTNKEKGDRTPFEWRSTMGAEWESYCERVRKLTKELGAKRCKLLLSPNAAELVEKYTAL

SEQ ID NO: 3743 - protein, 152 aa, unidentified; identical to SEQ ID NO: 3716
  REGION 1..152: note = Description of Unknown: uncultivated organism with predicted taxonomy: Coraliomargarita sp. CAG:312
  REGION 1..152: note = MG1-111 HNH domain

SEQ ID NO: 3744 - protein, 152 aa, unidentified; identical to SEQ ID NO: 3692
  REGION 1..152: note = Description of Unknown: uncultivated organism with predicted taxonomy: unclassified Verrucomicrobia (miscellaneous)
  REGION 1..152: note = MG1-112 HNH domain

SEQ ID NO: 3745 - protein, 152 aa, unidentified
  REGION 1..152: note = Description of Unknown: uncultivated organism with predicted taxonomy: Verrucomicrobia
  REGION 1..152: note = MG1-113 HNH domain
EDFMGKEQKKRMQIGMKKRASEKMLIAKKLDEAGYKGGNLLLKMELLEKQGGICLYTGEPLLPSELGVLEIEHIVPRSRGGPDAQYNYALTREKTNKEKADRTPFEWLSSDPVKWAGYSDRIKARAGQLGRKRCELLLEKNAEELVEKYTAL

SEQ ID NO: 3746 - protein, 152 aa, unidentified; identical to SEQ ID NO: 3641
  REGION 1..152: note = Description of Unknown: uncultivated organism with predicted taxonomy: unclassified Verrucomicrobia (miscellaneous)
  REGION 1..152: note = MG1-114 HNH domain

SEQ ID NO: 3747 - protein, 152 aa, unidentified; identical to SEQ ID NO: 3641
  REGION 1..152: note = Description of Unknown: uncultivated organism with predicted taxonomy: unclassified Verrucomicrobia (miscellaneous)
  REGION 1..152: note = MG1-115 HNH domain

SEQ ID NO: 3748 - protein, 158 aa, unidentified; identical to SEQ ID NO: 3719
  REGION 1..158: note = Description of Unknown: uncultivated organism with predicted taxonomy: Verrucomicrobia
  REGION 1..158: note = MG1-116 HNH domain

SEQ ID NO: 3749 - protein, 152 aa, unidentified; identical to SEQ ID NO: 3716
  REGION 1..152: note = Description of Unknown: uncultivated organism with predicted taxonomy: Coraliomargarita sp. CAG:312
  REGION 1..152: note = MG1-117 HNH domain

SEQ ID NO: 3750 - protein, 152 aa, unidentified; identical to SEQ ID NO: 3692
  REGION 1..152: note = Description of Unknown: uncultivated organism with predicted taxonomy: unclassified Verrucomicrobia (miscellaneous)
  REGION 1..152: note = MG1-118 HNH domain

SEQ ID NO: 3751 - protein, 152 aa, unidentified; identical to SEQ ID NO: 3692
  REGION 1..152: note = Description of Unknown: uncultivated organism with predicted taxonomy: unclassified Verrucomicrobia (miscellaneous)
  REGION 1..152: note = MG1-119 HNH domain

SEQ ID NO: 3752 - protein, 152 aa, unidentified
  REGION 1..152: note = Description of Unknown: uncultivated organism with predicted taxonomy: unclassified Verrucomicrobia (miscellaneous)
  REGION 1..152: note = MG1-120 HNH domain
EDFMGKEQKKRMQIEMKKRASEKMLIAKKLDEAGYKGGNLLLKMELLEKQGGICLYTGEPLLPSELGVLEIEHIVPRSRGGPDAQYNYALTREKTNKEKADRTPFEWLSSDPVKWAGYSDRVKARAGQLGRKRCELLLEKNAEELVEKYTAL

SEQ ID NO: 3753 - protein, 152 aa, unidentified; identical to SEQ ID NO: 3692
  REGION 1..152: note = Description of Unknown: uncultivated organism with predicted taxonomy: unclassified Verrucomicrobia (miscellaneous)
  REGION 1..152: note = MG1-121 HNH domain

SEQ ID NO: 3754 - protein, 152 aa, unidentified; identical to SEQ ID NO: 3692
  REGION 1..152: note = Description of Unknown: uncultivated organism with predicted taxonomy: unclassified Verrucomicrobia (miscellaneous)
  REGION 1..152: note = MG1-122 HNH domain

SEQ ID NO: 3755 - protein, 152 aa, unidentified; identical to SEQ ID NO: 3692
  REGION 1..152: note = Description of Unknown: uncultivated organism with predicted taxonomy: unclassified Verrucomicrobia (miscellaneous)
  REGION 1..152: note = MG1-123 HNH domain

SEQ ID NO: 3756 - protein, 158 aa, unidentified; identical to SEQ ID NO: 3719
  REGION 1..158: note = Description of Unknown: uncultivated organism with predicted taxonomy: Verrucomicrobia
  REGION 1..158: note = MG1-124 HNH domain

SEQ ID NO: 3757 - protein, 152 aa, unidentified; identical to SEQ ID NO: 3716
  REGION 1..152: note = Description of Unknown: uncultivated organism with predicted taxonomy: Verrucomicrobia
  REGION 1..152: note = MG1-125 HNH domain

SEQ ID NO: 3758 - protein, 152 aa, unidentified; identical to SEQ ID NO: 3692
  REGION 1..152: note = Description of Unknown: uncultivated organism with predicted taxonomy: unclassified Verrucomicrobia (miscellaneous)
  REGION 1..152: note = MG1-126 HNH domain

SEQ ID NO: 3759 - protein, 158 aa, unidentified; identical to SEQ ID NO: 3738
  REGION 1..158: note = Description of Unknown: uncultivated organism with predicted taxonomy: Verrucomicrobia
  REGION 1..158: note = MG1-127 HNH domain

SEQ ID NO: 3760 - protein, 152 aa, unidentified; identical to SEQ ID NO: 3692
  REGION 1..152: note = Description of Unknown: uncultivated organism with predicted taxonomy: unclassified Verrucomicrobia (miscellaneous)
  REGION 1..152: note = MG1-128 HNH domain

SEQ ID NO: 3761 - protein, 158 aa, unidentified; identical to SEQ ID NO: 3719
  REGION 1..158: note = Description of Unknown: uncultivated organism with predicted taxonomy: Verrucomicrobia
  REGION 1..158: note = MG1-129 HNH domain

SEQ ID NO: 3762 - protein, 152 aa, unidentified; identical to SEQ ID NO: 3692
  REGION 1..152: note = Description of Unknown: uncultivated organism with predicted taxonomy: unclassified Verrucomicrobia (miscellaneous)
  REGION 1..152: note = MG1-130 HNH domain

SEQ ID NO: 3763 - protein, 152 aa, unidentified; identical to SEQ ID NO: 3641
  REGION 1..152: note = Description of Unknown: uncultivated organism with predicted taxonomy: unclassified Verrucomicrobia (miscellaneous)
  REGION 1..152: note = MG1-131 HNH domain

SEQ ID NO: 3764 - protein, 152 aa, unidentified
  REGION 1..152: note = Description of Unknown: uncultivated organism with predicted taxonomy: unclassified Verrucomicrobia (miscellaneous)
  REGION 1..152: note = MG1-132 HNH domain
DDFMGEKEKKEMRIAMKKRAEEKMRIAKDLDEHGFKGGNLLLKMELYRKQNGICLYTGDALPLSELATLEIEHIVPRSRGGPDAQYNYVITREKTNKLKGDKTPYEWISSDAKEWASYTDRVNACAKALGKKRCRLLLEKDAEELVEKYTAL

SEQ ID NO: 3765 - protein, 152 aa, unidentified; identical to SEQ ID NO: 3716
  REGION 1..152: note = Description of Unknown: uncultivated organism with predicted taxonomy: Coraliomargarita sp. CAG:312
  REGION 1..152: note = MG1-133 HNH domain

SEQ ID NO: 3766 - protein, 152 aa, unidentified; identical to SEQ ID NO: 3641
  REGION 1..152: note = Description of Unknown: uncultivated organism with predicted taxonomy: unclassified Verrucomicrobia (miscellaneous)
  REGION 1..152: note = MG1-134 HNH domain

SEQ ID NO: 3767 - protein, 152 aa, unidentified; identical to SEQ ID NO: 3692
  REGION 1..152: note = Description of Unknown: uncultivated organism with predicted taxonomy: unclassified Verrucomicrobia (miscellaneous)
  REGION 1..152: note = MG1-135 HNH domain

SEQ ID NO: 3768 - protein, 158 aa, unidentified; identical to SEQ ID NO: 3719
  REGION 1..158: note = Description of Unknown: uncultivated organism with predicted taxonomy: Verrucomicrobia
  REGION 1..158: note = MG1-136 HNH domain

SEQ ID NO: 3769 - protein, 152 aa, unidentified; identical to SEQ ID NO: 3692
  REGION 1..152: note = Description of Unknown: uncultivated organism with predicted taxonomy: unclassified Verrucomicrobia (miscellaneous)
  REGION 1..152: note = MG1-137 HNH domain

SEQ ID NO: 3770 - protein, 152 aa, unidentified; identical to SEQ ID NO: 3692
  REGION 1..152: note = Description of Unknown: uncultivated organism with predicted taxonomy: unclassified Verrucomicrobia (miscellaneous)
  REGION 1..152: note = MG1-138 HNH domain

SEQ ID NO: 3771 - protein, 152 aa, unidentified; identical to SEQ ID NO: 3692
  REGION 1..152: note = Description of Unknown: uncultivated organism with predicted taxonomy: unclassified Verrucomicrobia (miscellaneous)
  REGION 1..152: note = MG1-139 HNH domain

SEQ ID NO: 3772 - protein, 152 aa, unidentified; identical to SEQ ID NO: 3692
  REGION 1..152: note = Description of Unknown: uncultivated organism with predicted taxonomy: unclassified Verrucomicrobia (miscellaneous)
  REGION 1..152: note = MG1-140 HNH domain

SEQ ID NO: 3773 - protein, 158 aa, unidentified
  REGION 1..158: note = Description of Unknown: uncultivated organism with predicted taxonomy: Verrucomicrobia
  REGION 1..158: note = MG1-141 HNH domain
DDFLGKKAKSDLNKAIKTRFDEKKKLAEELDSNRAEFGPKYASKKMLLKYELYKKQGGKCVYTGNALPLSELENLEIEHIVPRSRGGPDAMYNYVLTDEKTNKEKGDRTPFEWRSTMGAEWESYCARVRELTKKLGAKRCKLLLAPNAAELVEKYTAL

SEQ ID NO: 3774 - protein, 152 aa, unidentified
  REGION 1..152: note = Description of Unknown: uncultivated organism with predicted taxonomy: unclassified Verrucomicrobia (miscellaneous)
  REGION 1..152: note = MG1-142 HNH domain
EDFMGKEQKKRMQIEMKKRASEKMLIAKKLDEAGYKGGNLLLKMELFEKQGGVCLYTGEPLLPSELGILEIEHIVPRSRGGPDAQYNYVLTREKTNKEKADRTPFEWLSSDPVRWAGYSDRVKARAGQLGRKRCELLLEKNAEELVEKYTAL

SEQ ID NO: 3775 - protein, 152 aa, unidentified
  REGION 1..152: note = Description of Unknown: uncultivated organism with predicted taxonomy: Verrucomicrobia bacterium
  REGION 1..152: note = MG1-143 HNH domain
EDFMGKEQKKRMQIEMKKRASEKMLIAKKLDEAGYKGGNLLMKMELLEKQGGICLYTGEPLLPSELGVLEIEHIVPRSRGGPDAQYNYVLTREKTNKEKADRTPFEWLSSDPVKWAGYSDRVKARAGQLGRKRCELLLEKNAEELVEKYTAL

SEQ ID NO: 3776 - protein, 152 aa, unidentified; identical to SEQ ID NO: 3641
  REGION 1..152: note = Description of Unknown: uncultivated organism with predicted taxonomy: unclassified Verrucomicrobia (miscellaneous)
  REGION 1..152: note = MG1-144 HNH domain

SEQ ID NO: 3777 - protein, 158 aa, unidentified
  REGION 1..158: note = Description of Unknown: uncultivated organism with predicted taxonomy: Verrucomicrobia
  REGION 1..158: note = MG1-145 HNH domain
DDFLGKKAKSDLNKAIKTRFDEKKKLAEELDSNRAEFGPKYASKKMLLKYELYKKQGGKCVYTGKALPLSELENLEIEHIVPRSRGGPDAMYNYVLTDEKTNKEKGDRTPFEWRSTMGAEWESYCERVRKLTKELGAKRCKLLLSPNAAELVEKYTAL

SEQ ID NO: 3778 - protein, 152 aa, unidentified; identical to SEQ ID NO: 3692
  REGION 1..152: note = Description of Unknown: uncultivated organism with predicted taxonomy: unclassified Verrucomicrobia (miscellaneous)
  REGION 1..152: note = MG1-147 HNH domain

SEQ ID NO: 3779 - protein, 152 aa, unidentified; identical to SEQ ID NO: 3692
  REGION 1..152: note = Description of Unknown: uncultivated organism with predicted taxonomy: unclassified Verrucomicrobia (miscellaneous)
  REGION 1..152: note = MG1-148 HNH domain

SEQ ID NO: 3780 - protein, 152 aa, unidentified
  REGION 1..152: note = Description of Unknown: uncultivated organism with predicted taxonomy: unclassified Verrucomicrobia (miscellaneous)
  REGION 1..152: note = MG1-149 HNH domain
DDFMGEKEKKEMRIAMKKRAEEKMRIAKDLDEHGFKGGNLLLKMELYRKQNGICLYTGDALPLSELATLEIEHIVPRSRGGPDAQYNYVITREKTNKLKGDKTPYEWISSDAKEWASYTDRVTACAKALGKKRCRLLLEKDAEELVEKYTAL

SEQ ID NO: 3781 - protein, 152 aa, unidentified; identical to SEQ ID NO: 3716
  REGION 1..152: note = Description of Unknown: uncultivated organism with predicted taxonomy: Coraliomargarita sp. CAG:312
  REGION 1..152: note = MG1-150 HNH domain

SEQ ID NO: 3782 - protein, 152 aa, unidentified
  REGION 1..152: note = Description of Unknown: uncultivated organism with predicted taxonomy: Verrucomicrobia
  REGION 1..152: note = MG1-151 HNH domain
EDFMGKEQKKRMQIEMKKRASEKMLIAKKLDEAGYKGGNLLLKMELLEKQGGICLYTGEPLLPSELGVLEIEHIVPRSRGGPDAQYNYVLTREKTNKEKADRTPFEWLSSDPVKWAGYSDRVKARAGQLGRKRCELLLEKNAEELVEKYTAL

SEQ ID NO: 3783 - protein, 158 aa, unidentified; identical to SEQ ID NO: 3723
  REGION 1..158: note = Description of Unknown: uncultivated organism
  REGION 1..158: note = MG1-152 HNH domain

SEQ ID NO: 3784 - protein, 152 aa, unidentified; identical to SEQ ID NO: 3692
  REGION 1..152: note = Description of Unknown: uncultivated organism with predicted taxonomy: unclassified Verrucomicrobia (miscellaneous)
  REGION 1..152: note = MG1-153 HNH domain

SEQ ID NO: 3785 - protein, 158 aa, unidentified
  REGION 1..158: note = Description of Unknown: uncultivated organism with predicted taxonomy: Verrucomicrobia
  REGION 1..158: note = MG1-154 HNH domain
DDFLGKKAKSDLNKAIKTRFDEKKKLAEDLDSKREEFGLKYASKKMLLKFELYKKQGGECVYTGNALPLSELENLEVEHIVPRSRGGPDAMYNYVLTDEKTNKEKGDRTPFEWRSTMGAEWESYCERVRKLTKELGAKRCKLLLSPNAAELVEKYTAL

SEQ ID NO: 3786 - protein, 158 aa, unidentified
  REGION 1..158: note = Description of Unknown: uncultivated organism with predicted taxonomy: Verrucomicrobia
  REGION 1..158: note = MG1-155 HNH domain
DDFLGKKAKADLSRAINDRAKERKKYAEELDSQREIFGSKYASKKMLLKYELYSKQKGVCVYTGNALGFSNLEQLEVEHIVPRSRGGPDALYNYVLTDEKTNKEKGDRTPFEWLSSKGLEWESYCQRVRELTKEFGAKRCRLLLSPNAEELVEKYTAL

SEQ ID NO: 3787 - protein, 152 aa, unidentified; identical to SEQ ID NO: 3716
  REGION 1..152: note = Description of Unknown: uncultivated organism with predicted taxonomy: Coraliomargarita sp. CAG:312
  REGION 1..152: note = MG1-156 HNH domain

SEQ ID NO: 3788 - protein, 152 aa, unidentified
  REGION 1..152: note = Description of Unknown: uncultivated organism with predicted taxonomy: Verrucomicrobia
  REGION 1..152: note = MG1-157 HNH domain
DDFLGEKAKKEYQKAINERFKEKQELAKEMDEAGYKGAKMLLKLELYKKQGGQCVYTGEALPSSEIASLEIEHIVPRSRGGPDSIYNYVLTRERTNKEKADRTPYEWLSRDQQRWNAYVSRVNSLYKSLGGKRCKLLLANNAEELVDKYTAL

SEQ ID NO: 3789 - protein, 152 aa, unidentified
  REGION 1..152: note = Description of Unknown: uncultivated organism with predicted taxonomy: unclassified Verrucomicrobia (miscellaneous)
  REGION 1..152: note = MG1-158 HNH domain
EDFMGKEQKKRMQIEMKKRASEKMLIAKKLDEAGYKGGNLLLKMELLEKQGGVCLYTGEPLLPSELGVLEIEHIVPRSRGGPDAQYNYVLTREKTNKEKADRTPFEWLSSDPVKWAGYSDRVTARAGQLGRKRCELLLEKNAEELVEKYTAL

SEQ ID NO: 3790 - protein, 152 aa, unidentified
  REGION 1..152: note = Description of Unknown: uncultivated organism with predicted taxonomy: Coraliomargarita sp. CAG:312
  REGION 1..152: note = MG1-159 HNH domain
DDFIGKEKKKELNIAIKKRYSEKLKIAEKLDEIGFKGSKMLMKLELFQKQGGICLYTREPLLPTEIPSLEIEHIVPRSRGGPDSAYNFVLTREATNKEKANRTPFEWLSGDSQKWVSYSDRVMSRSKELGKKRCQLLLKENAEELVEKYTAL

SEQ ID NO: 3791 - protein, 152 aa, unidentified; identical to SEQ ID NO: 3692
  REGION 1..152: note = Description of Unknown: uncultivated organism with predicted taxonomy: unclassified Verrucomicrobia (miscellaneous)
  REGION 1..152: note = MG1-160 HNH domain

SEQ ID NO: 3792 - protein, 158 aa, unidentified; identical to SEQ ID NO: 3723
  REGION 1..158: note = Description of Unknown: uncultivated organism with predicted taxonomy: Verrucomicrobia
  REGION 1..158: note = MG1-161 HNH domain

SEQ ID NO: 3793 - protein, 152 aa, unidentified; identical to SEQ ID NO: 3716
  REGION 1..152: note = Description of Unknown: uncultivated organism with predicted taxonomy: Coraliomargarita sp. CAG:312
  REGION 1..152: note = MG1-162 HNH domain

SEQ ID NO: 3794 - protein, 152 aa, unidentified
  REGION 1..152: note = Description of Unknown: uncultivated organism with predicted taxonomy: unclassified Verrucomicrobia (miscellaneous)
  REGION 1..152: note = MG1-163 HNH domain
EDFMGKEQKKRMQIEMKKRASEKMLIAKKLDEAGYKGGNLLLKMELLEKQGGVCLYTGEPLLPSELGVLEIEHIVPRSRGGPDAQYNYVLPREKTNKEKADRTPFEWLSSDPVKWAGYSDRVKARAGQLGRKRCELLLEKNAEELVEKYTAL

SEQ ID NO: 3795 - protein, 158 aa, unidentified
  REGION 1..158: note = Description of Unknown: uncultivated organism with predicted taxonomy: Verrucomicrobia
  REGION 1..158: note = MG1-164 HNH domain
DDFLGSKAKKEMSQGIKKRFEEKKKLAEELDSQRAEFGNKYASKKMLLKFELYKKQRGRCVYTDNALPLSELENLEVEHIFPRSRGGADAMYNYVLTDENTNKQKGERTPFEWLSSDKTKWESYCDRVRSLTQSLGAKRCKLLVSPNAEELMQKYTAL

SEQ ID NO: 3796 - protein, 152 aa, unidentified; identical to SEQ ID NO: 3692
  REGION 1..152: note = Description of Unknown: uncultivated organism with predicted taxonomy: unclassified Verrucomicrobia (miscellaneous)
  REGION 1..152: note = MG1-165 HNH domain

SEQ ID NO: 3797 - protein, 152 aa, unidentified
  REGION 1..152: note = Description of Unknown: uncultivated organism with predicted taxonomy: unclassified Verrucomicrobia (miscellaneous)
  REGION 1..152: note = MG1-166 HNH domain
DDFMGEKEKKEMRIAMKKRAEEKMRIAKDLDEHGFKGGNLLLKMELYRKQNGICLYTGDALPLSELATLEIEHIVPRSRGGPDAQYNYVITREKTNKLKGDKTPYEWLSSDAKEWASYTDRVNACAKGLGKKRCRLLLEKDAEELVEKYTAL

SEQ ID NO: 3798 - protein, 152 aa, unidentified; identical to SEQ ID NO: 3692
  REGION 1..152: note = Description of Unknown: uncultivated organism with predicted taxonomy: unclassified Verrucomicrobia (miscellaneous)
  REGION 1..152: note = MG1-167 HNH domain

SEQ ID NO: 3799 - protein, 158 aa, unidentified; identical to SEQ ID NO: 3723
  REGION 1..158: note = Description of Unknown: uncultivated organism with predicted taxonomy: Verrucomicrobia
  REGION 1..158: note = MG1-168 HNH domain

SEQ ID NO: 3800 - protein, 152 aa, unidentified; identical to SEQ ID NO: 3692
  REGION 1..152: note = Description of Unknown: uncultivated organism with predicted taxonomy: unclassified Verrucomicrobia (miscellaneous)
  REGION 1..152: note = MG1-169 HNH domain

SEQ ID NO: 3801 - protein, 152 aa, unidentified; identical to SEQ ID NO: 3692
  REGION 1..152: note = Description of Unknown: uncultivated organism with predicted taxonomy: unclassified Verrucomicrobia (miscellaneous)
  REGION 1..152: note = MG1-170 HNH domain

SEQ ID NO: 3802 - protein, 152 aa, unidentified
  REGION 1..152: note = Description of Unknown: uncultivated organism with predicted taxonomy: unclassified Verrucomicrobia (miscellaneous)
  REGION 1..152: note = MG1-171 HNH domain
DDFMGEKEKKEMRIAMKKRAEEKMRIAKDLDEHGFKGDNLLLKMELYRKQNGICLYTGDALPLSELATLEIEHIVPRSRGGPDAQYNYVITREKTNKLKGDKTPYEWLSSDAKEWASYTDRVNACAKALGKKRCRLLLEKDAEELVEKYTAL

SEQ ID NO: 3803 - protein, 158 aa, unidentified; identical to SEQ ID NO: 3719
  REGION 1..158: note = Description of Unknown: uncultivated organism with predicted taxonomy: Verrucomicrobia
  REGION 1..158: note = MG1-172 HNH domain

SEQ ID NO: 3804 - protein, 152 aa, unidentified
  REGION 1..152: note = Description of Unknown: uncultivated organism with predicted taxonomy: unclassified Verrucomicrobia (miscellaneous)
  REGION 1..152: note = MG1-173 HNH domain
DDFMGEKEKKEMRIAMKKRAEEKMRIAKDLDEHGFKGGNLLLKMELYRKQNGICLYTGDALPLSELATLEIEHIVPRSRGGPDAQYNYVITREKTNKLKGDKTPYEWLSSDAKEWASYTDRVNACTKALGKKRCRLLLEKDAEELVEKYTAL

SEQ ID NO: 3805 - protein, 152 aa, unidentified; identical to SEQ ID NO: 3692
  REGION 1..152: note = Description of Unknown: uncultivated organism with predicted taxonomy: unclassified Verrucomicrobia (miscellaneous)
  REGION 1..152: note = MG1-174 HNH domain

SEQ ID NO: 3806 - protein, 158 aa, unidentified; identical to SEQ ID NO: 3719
  REGION 1..158: note = Description of Unknown: uncultivated organism with predicted taxonomy: Coraliomargarita sp. CAG:312
  REGION 1..158: note = MG1-175 HNH domain

SEQ ID NO: 3807 - protein, 152 aa, unidentified; identical to SEQ ID NO: 3734
  REGION 1..152: note = Description of Unknown: uncultivated organism with predicted taxonomy: unclassified Verrucomicrobia (miscellaneous)
  REGION 1..152: note = MG1-176 HNH domain

SEQ ID NO: 3808 - protein, 158 aa, unidentified; identical to SEQ ID NO: 3777
  REGION 1..158: note = Description of Unknown: uncultivated organism with predicted taxonomy: Verrucomicrobia
  REGION 1..158: note = MG1-177 HNH domain

SEQ ID NO: 3809 - protein, 152 aa, unidentified; identical to SEQ ID NO: 3790
  REGION 1..152: note = Description of Unknown: uncultivated organism with predicted taxonomy: Coraliomargarita sp. CAG:312
  REGION 1..152: note = MG1-178 HNH domain

SEQ ID NO: 3810 - protein, 158 aa, unidentified; identical to SEQ ID NO: 3773
  REGION 1..158: note = Description of Unknown: uncultivated organism with predicted taxonomy: Coraliomargarita sp. CAG:312
  REGION 1..158: note = MG1-179 HNH domain

SEQ ID NO: 3811 - protein, 152 aa, unidentified; identical to SEQ ID NO: 3764
  REGION 1..152: note = Description of Unknown: uncultivated organism with predicted taxonomy: unclassified Verrucomicrobia (miscellaneous)
  REGION 1..152: note = MG1-180 HNH domain

SEQ ID NO: 3812 - protein, 152 aa, unidentified; identical to SEQ ID NO: 3641
  REGION 1..152: note = Description of Unknown: uncultivated organism with predicted taxonomy: unclassified Verrucomicrobia (miscellaneous)
  REGION 1..152: note = MG1-181 HNH domain

SEQ ID NO: 3813 - protein, 152 aa, unidentified; identical to SEQ ID NO: 3641
  REGION 1..152: note = Description of Unknown: uncultivated organism with predicted taxonomy: unclassified Verrucomicrobia (miscellaneous)
  REGION 1..152: note = MG1-182 HNH domain

SEQ ID NO: 3814 - protein, 152 aa, unidentified; identical to SEQ ID NO: 3727
  REGION 1..152: note = Description of Unknown: uncultivated organism with predicted taxonomy: Coraliomargarita sp. CAG:312
  REGION 1..152: note = MG1-183 HNH domain

SEQ ID NO: 3815 - protein, 152 aa, unidentified; identical to SEQ ID NO: 3692
  REGION 1..152: note = Description of Unknown: uncultivated organism with predicted taxonomy: unclassified Verrucomicrobia (miscellaneous)
  REGION 1..152: note = MG1-184 HNH domain

SEQ ID NO: 3816 - protein, 152 aa, unidentified; identical to SEQ ID NO: 3716
  REGION 1..152: note = Description of Unknown: uncultivated organism with predicted taxonomy: Coraliomargarita sp. CAG:312
  REGION 1..152: note = MG1-185 HNH domain

SEQ ID NO: 3817 - protein, 152 aa, unidentified; identical to SEQ ID NO: 3692
  REGION 1..152: note = Description of Unknown: uncultivated organism with predicted taxonomy: unclassified Verrucomicrobia (miscellaneous)
  REGION 1..152: note = MG1-186 HNH domain

SEQ ID NO: 3818 - protein, 158 aa, unidentified; identical to SEQ ID NO: 3719
  REGION 1..158: note = Description of Unknown: uncultivated organism with predicted taxonomy: Verrucomicrobia
  REGION 1..158: note = MG1-187 HNH domain

SEQ ID NO: 3819 - protein, 152 aa, unidentified; identical to SEQ ID NO: 3716
  REGION 1..152: note = Description of Unknown: uncultivated organism with predicted taxonomy: Verrucomicrobia
  REGION 1..152: note = MG1-188 HNH domain

SEQ ID NO: 3820 - protein, 158 aa, unidentified; identical to SEQ ID NO: 3719
  REGION 1..158: note = Description of Unknown: uncultivated organism with predicted taxonomy: Verrucomicrobia
  REGION 1..158: note = MG1-189 HNH domain

SEQ ID NO: 3821 - protein, 152 aa, unidentified; identical to SEQ ID NO: 3692
  REGION 1..152: note = Description of Unknown: uncultivated organism with predicted taxonomy: unclassified Verrucomicrobia (miscellaneous)
  REGION 1..152: note = MG1-190 HNH domain

SEQ ID NO: 3822 - protein, 152 aa, unidentified; identical to SEQ ID NO: 3692
  REGION 1..152: note = Description of Unknown: uncultivated organism with predicted taxonomy: unclassified Verrucomicrobia (miscellaneous)
  REGION 1..152: note = MG1-191 HNH domain

SEQ ID NO: 3823 - protein, 152 aa, unidentified
  REGION 1..152: note = Description of Unknown: uncultivated organism with predicted taxonomy: unclassified Verrucomicrobia (miscellaneous)
  REGION 1..152: note = MG1-192 HNH domain
DDFMGEKEKKEMRIAMKKRAEEKMRIAKDLDGHGFKGGNLLLKMELYRKQNGICLYTGDALPLSELATLEIEHIVPRSRGGPDAQYNYVITREKTNKLKGDKTPYEWLSSDAKEWASYTDRVNACAKALGKKRCRLLLEKDAEELVEKYTAL

SEQ ID NO: 3824 - protein, 158 aa, unidentified; identical to SEQ ID NO: 3785
  REGION 1..158: note = Description of Unknown: uncultivated organism with predicted taxonomy: Verrucomicrobia
  REGION 1..158: note = MG1-193 HNH domain

SEQ ID NO: 3825 - protein, 152 aa, unidentified; identical to SEQ ID NO: 3764
  REGION 1..152: note = Description of Unknown: uncultivated organism with predicted taxonomy: unclassified Verrucomicrobia (miscellaneous)
  REGION 1..152: note = MG1-194 HNH domain

SEQ ID NO: 3826 - protein, 152 aa, unidentified; identical to SEQ ID NO: 3692
  REGION 1..152: note = Description of Unknown: uncultivated organism with predicted taxonomy: unclassified Verrucomicrobia (miscellaneous)
  REGION 1..152: note = MG1-195 HNH domain

SEQ ID NO: 3827 - protein, 152 aa, unidentified; identical to SEQ ID NO: 3782
  REGION 1..152: note = Description of Unknown: uncultivated organism with predicted taxonomy: Verrucomicrobia
  REGION 1..152: note = MG1-196 HNH domain

SEQ ID NO: 3828 - protein, 152 aa, unidentified; identical to SEQ ID NO: 3692
  REGION 1..152: note = Description of Unknown: uncultivated organism with predicted taxonomy: unclassified Verrucomicrobia (miscellaneous)
  REGION 1..152: note = MG1-197 HNH domain

SEQ ID NO: 3829 - protein, 152 aa, unidentified
  REGION 1..152: note = Description of Unknown: uncultivated organism with predicted taxonomy: unclassified Verrucomicrobia (miscellaneous)
  REGION 1..152: note = MG1-198 HNH domain
DDFMGEKEKKEMRIAMKKRAEEKMRIAKDLDEHGFKGGNLLLKMELYRKQNGICLYTGDALPLSELATLEIEHIVPRSRGGPDAQYNYVITREKTNKLKGDKTPYEWLSSDAKEWASYTDRVNACAKAFGKKRCRLLLEKDAEELVEKYTAL

SEQ ID NO: 3830 - protein, 152 aa, unidentified; identical to SEQ ID NO: 3829
  REGION 1..152: note = Description of Unknown: uncultivated organism with predicted taxonomy: unclassified Verrucomicrobia (miscellaneous)
  REGION 1..152: note = MG1-199 HNH domain

SEQ ID NO: 3831 - protein, 158 aa, unidentified
  REGION 1..158: note = Description of Unknown: uncultivated organism
  REGION 1..158: note = MG1-200 HNH domain
DDFLGKKAKSDLNKAIKTRFDEKKKLAEDLDSKREEFGFKYASKKMLLKFELYKKQGGKCVYTGNALPLSELESLEIEHIVPRSRGGPDAMYNYVLTDEKTNKEKGDRTPFEWLSTMGAEWESYCERVRKLTKELGAKRCKLLLSPNAAELVEKYTAL

SEQ ID NO: 3832 - protein, 158 aa, unidentified; identical to SEQ ID NO: 3719
  REGION 1..158: note = Description of Unknown: uncultivated organism with predicted taxonomy: Verrucomicrobia
  REGION 1..158: note = MG1-201 HNH domain

SEQ ID NO: 3833 - protein, 158 aa, unidentified
  REGION 1..158: note = Description of Unknown: uncultivated organism with predicted taxonomy: Coraliomargarita sp. CAG:312
  REGION 1..158: note = MG1-202 HNH domain
DDFLGKKAKSDLNKAIKTRFDEKKKLAEELDSNRAEFGPKYASKKMLLKYELYKKQGGKCVYTGKALPLSELENLEIEHIVPRSRGGPDAMYNYVLTDEKTNKEKGDRTPFEWRSTMGAEWESYCERVRKLTKELGAKRCKLLLAPNAAELVEKYTAL

SEQ ID NO: 3834 - protein, 152 aa, unidentified; identical to SEQ ID NO: 3716
  REGION 1..152: note = Description of Unknown: uncultivated organism with predicted taxonomy: Coraliomargarita sp. CAG:312
  REGION 1..152: note = MG1-203 HNH domain

SEQ ID NO: 3835 - protein, 158 aa, unidentified; identical to SEQ ID NO: 3742
  REGION 1..158: note = Description of Unknown: uncultivated organism with predicted taxonomy: Verrucomicrobia
  REGION 1..158: note = MG1-204 HNH domain

SEQ ID NO: 3836 - protein, 158 aa, unidentified; identical to SEQ ID NO: 3719
  REGION 1..158: note = Description of Unknown: uncultivated organism with predicted taxonomy: Coraliomargarita sp. CAG:312
  REGION 1..158: note = MG1-205 HNH domain

SEQ ID NO: 3837 - protein, 152 aa, unidentified; identical to SEQ ID NO: 3716
  REGION 1..152: note = Description of Unknown: uncultivated organism with predicted taxonomy: Coraliomargarita sp. CAG:312
  REGION 1..152: note = MG1-206 HNH domain

SEQ ID NO: 3838 - protein, 152 aa, unidentified; identical to SEQ ID NO: 3752
  REGION 1..152: note = Description of Unknown: uncultivated organism with predicted taxonomy: unclassified Verrucomicrobia (miscellaneous)
  REGION 1..152: note = MG1-207 HNH domain

SEQ ID NO: 3839 - protein, 152 aa, unidentified; identical to SEQ ID NO: 3692
  REGION 1..152: note = Description of Unknown: uncultivated organism with predicted taxonomy: unclassified Verrucomicrobia (miscellaneous)
  REGION 1..152: note = MG1-208 HNH domain

SEQ ID NO: 3840 - protein, 152 aa, unidentified; identical to SEQ ID NO: 3741
  REGION 1..152: note = Description of Unknown: uncultivated organism with predicted taxonomy: unclassified Verrucomicrobia (miscellaneous)
  REGION 1..152: note = MG1-209 HNH domain

SEQ ID NO: 3841 - protein, 152 aa, unidentified; identical to SEQ ID NO: 3692
  REGION 1..152: note = Description of Unknown: uncultivated organism with predicted taxonomy: unclassified Verrucomicrobia (miscellaneous)
  REGION 1..152: note = MG1-210 HNH domain

SEQ ID NO: 3842 - protein, 152 aa, unidentified; identical to SEQ ID NO: 3718
  REGION 1..152: note = Description of Unknown: uncultivated organism with predicted taxonomy: Coraliomargarita sp. CAG:312
  REGION 1..152: note = MG1-211 HNH domain

SEQ ID NO: 3843 - protein, 152 aa, unidentified; identical to SEQ ID NO: 3692
  REGION 1..152: note = Description of Unknown: uncultivated organism with predicted taxonomy: unclassified Verrucomicrobia (miscellaneous)
  REGION 1..152: note = MG1-212 HNH domain

SEQ ID NO: 3844 - protein, 152 aa, unidentified; identical to SEQ ID NO: 3692
  REGION 1..152: note = Description of Unknown: uncultivated organism with predicted taxonomy: unclassified Verrucomicrobia (miscellaneous)
  REGION 1..152: note = MG1-213 HNH domain

SEQ ID NO: 3845 - protein, 152 aa, unidentified; identical to SEQ ID NO: 3692
  REGION 1..152: note = Description of Unknown: uncultivated organism with predicted taxonomy: unclassified Verrucomicrobia (miscellaneous)
  REGION 1..152: note = MG1-214 HNH domain

SEQ ID NO: 3846 - protein, 152 aa, unidentified; identical to SEQ ID NO: 3692
  REGION 1..152: note = Description of Unknown: uncultivated organism with predicted taxonomy: unclassified Verrucomicrobia (miscellaneous)
  REGION 1..152: note = MG1-215 HNH domain

SEQ ID NO: 3847 - protein, 152 aa, unidentified
  REGION 1..152: note = Description of Unknown: uncultivated organism with predicted taxonomy: unclassified Verrucomicrobia (miscellaneous)
  REGION 1..152: note = MG1-216 HNH domain
DDFMGEKEKKEMRIAMKKRAEEKMRIAKDLDEHGFKGGNLLLKMELYRKQNGICLYTGDALPLSELATLEIEHIVPRSRGGPDAQYNYVIIREKTNKLKGDKTPYEWLSSDAKEWASYTDRVNACAKALGKKRCRLLLEKDAEELVEKYTAL

SEQ ID NO: 3848 - protein, 152 aa, unidentified; identical to SEQ ID NO: 3716
  REGION 1..152: note = Description of Unknown: uncultivated organism with predicted taxonomy: Coraliomargarita sp. CAG:312
  REGION 1..152: note = MG1-217 HNH domain

SEQ ID NO: 3849 - protein, 152 aa, unidentified; identical to SEQ ID NO: 3692
  REGION 1..152: note = Description of Unknown: uncultivated organism with predicted taxonomy: unclassified Verrucomicrobia (miscellaneous)
  REGION 1..152: note = MG1-218 HNH domain

SEQ ID NO: 3850 - protein, 152 aa, unidentified; identical to SEQ ID NO: 3692
  REGION 1..152: note = Description of Unknown: uncultivated organism with predicted taxonomy: unclassified Verrucomicrobia (miscellaneous)
  REGION 1..152: note = MG1-219 HNH domain

SEQ ID NO: 3851 - protein, 152 aa, unidentified
  REGION 1..152: note = Description of Unknown: uncultivated organism with predicted taxonomy: unclassified Verrucomicrobia (miscellaneous)
  REGION 1..152: note = MG1-220 HNH domain
DDFMGEKEKKEMRIAMKKRAEGKMRIAKDLDEHGFKGGNLLLKMELYRKQNGICLYTGDALPLSELATLEIEHIVPRSRGGPDAQYNYVITREKTNKLKGDKTPYEWLSSDAKEWASYTDRVNACAKALGKKRCHLLLEKDAEELVEKYTAL

SEQ ID NO: 3852 - protein, 152 aa, unidentified; identical to SEQ ID NO: 3692
  REGION 1..152: note = Description of Unknown: uncultivated organism with predicted taxonomy: unclassified Verrucomicrobia (miscellaneous)
  REGION 1..152: note = MG1-221 HNH domain

SEQ ID NO: 3853 - protein, 152 aa, unidentified; identical to SEQ ID NO: 3692
  REGION 1..152: note = Description of Unknown: uncultivated organism with predicted taxonomy: unclassified Verrucomicrobia (miscellaneous)
  REGION 1..152: note = MG1-222 HNH domain

SEQ ID NO: 3854 - protein, 152 aa, unidentified; identical to SEQ ID NO: 3692
  REGION 1..152: note = Description of Unknown: uncultivated organism with predicted taxonomy: unclassified Verrucomicrobia (miscellaneous)
  REGION 1..152: note = MG1-223 HNH domain

SEQ ID NO: 3855 - protein, 152 aa, unidentified; identical to SEQ ID NO: 3641
  REGION 1..152: note = Description of Unknown: uncultivated organism with predicted taxonomy: unclassified Verrucomicrobia (miscellaneous)
  REGION 1..152: note = MG1-224 HNH domain

SEQ ID NO: 3856 - protein, 152 aa, unidentified; identical to SEQ ID NO: 3716
  REGION 1..152: note = Description of Unknown: uncultivated organism with predicted taxonomy: Coraliomargarita sp. CAG:312
  REGION 1..152: note = MG1-225 HNH domain

SEQ ID NO: 3857 - protein, 152 aa, unidentified; identical to SEQ ID NO: 3716
  REGION 1..152: note = Description of Unknown: uncultivated organism with predicted taxonomy: Coraliomargarita sp. CAG:312
  REGION 1..152: note = MG1-226 HNH domain

SEQ ID NO: 3858 - protein, 152 aa, unidentified
  REGION 1..152: note = Description of Unknown: uncultivated organism with predicted taxonomy: Coraliomargarita sp. CAG:312
  REGION 1..152: note = MG1-227 HNH domain
EDFMGKQAKKDLSLYMKKRFEEKIDIAKKLDDIGYKGNKMLLKMELLQKQGFACLYTGEALQETDLPILEIEHIVPRSLGGPDAAYNYVLTSESTNKAKGNQTPYKWLSPDRDKWRAYTERVRARAAELGSKRCRLLLSENAEELINKYTAL

SEQ ID NO: 3859 - protein, 152 aa, unidentified; identical to SEQ ID NO: 3692
  REGION 1..152: note = Description of Unknown: uncultivated organism with predicted taxonomy: unclassified Verrucomicrobia (miscellaneous)
  REGION 1..152: note = MG1-228 HNH domain

SEQ ID NO: 3860 - protein, 152 aa, unidentified; identical to SEQ ID NO: 3692
  REGION 1..152: note = Description of Unknown: uncultivated organism with predicted taxonomy: Verrucomicrobia
  REGION 1..152: note = MG1-229 HNH domain

SEQ ID NO: 3861 - protein, 152 aa, unidentified
  REGION 1..152: note = Description of Unknown: uncultivated organism with predicted taxonomy: Verrucomicrobia
  REGION 1..152: note = MG1-230 HNH domain
DDFMGEKEKKEMRIAMKKRAEEKMRIAKDLDEHGFKGGNLLLKMELYRKQNGICLYTGDALPLSELATLEIEHIVPRSRGGPDAQYNYVITREKTNKLKGDKTPYEWLSSDAKEWASYTDRVNACAKALGKKRCRLLLEKDAEELVEKYTTL

SEQ ID NO: 3862 - protein, 152 aa, unidentified; identical to SEQ ID NO: 3692
  REGION 1..152: note = Description of Unknown: uncultivated organism with predicted taxonomy: unclassified Verrucomicrobia (miscellaneous)
  REGION 1..152: note = MG1-231 HNH domain

SEQ ID NO: 3863 - protein, 158 aa, unidentified; identical to SEQ ID NO: 3719
  REGION 1..158: note = Description of Unknown: uncultivated organism with predicted taxonomy: Verrucomicrobia
  REGION 1..158: note = MG1-232 HNH domain

SEQ ID NO: 3864 - protein, 152 aa, unidentified; identical to SEQ ID NO: 3745
  REGION 1..152: note = Description of Unknown: uncultivated organism
  REGION 1..152: note = MG1-233 HNH domain

SEQ ID NO: 3865 - protein, 152 aa, unidentified; identical to SEQ ID NO: 3692
  REGION 1..152: note = Description of Unknown: uncultivated organism with predicted taxonomy: unclassified Verrucomicrobia (miscellaneous)
  REGION 1..152: note = MG1-234 HNH domain

SEQ ID NO: 3866 - protein, 152 aa, unidentified; identical to SEQ ID NO: 3692
  REGION 1..152: note = Description of Unknown: uncultivated organism with predicted taxonomy: unclassified Verrucomicrobia (miscellaneous)
  REGION 1..152: note = MG1-236 HNH domain

SEQ ID NO: 3867 - protein, 152 aa, unidentified; identical to SEQ ID NO: 3692
  REGION 1..152: note = Description of Unknown: uncultivated organism with predicted taxonomy: Verrucomicrobia
  REGION 1..152: note = MG1-237 HNH domain

SEQ ID NO: 3868 - protein, 152 aa, unidentified; identical to SEQ ID NO: 3716
  REGION 1..152: note = Description of Unknown: uncultivated organism with predicted taxonomy: Coraliomargarita sp. CAG:312
  REGION 1..152: note = MG1-238 HNH domain

SEQ ID NO: 3869 - protein, 152 aa, unidentified; identical to SEQ ID NO: 3641
  REGION 1..152: note = Description of Unknown: uncultivated organism with predicted taxonomy: unclassified Verrucomicrobia (miscellaneous)
  REGION 1..152: note = MG1-239 HNH domain

SEQ ID NO: 3870 - protein, 152 aa, unidentified; identical to SEQ ID NO: 3692
  REGION 1..152: note = Description of Unknown: uncultivated organism with predicted taxonomy: unclassified Verrucomicrobia (miscellaneous)
  REGION 1..152: note = MG1-240 HNH domain

SEQ ID NO: 3871 - protein, 152 aa, unidentified; identical to SEQ ID NO: 3716
  REGION 1..152: note = Description of Unknown: uncultivated organism with predicted taxonomy: Verrucomicrobia
  REGION 1..152: note = MG1-241 HNH domain

SEQ ID NO: 3872 - protein, 152 aa, unidentified; identical to SEQ ID NO: 3716
  REGION 1..152: note = Description of Unknown: uncultivated organism with predicted taxonomy: Coraliomargarita sp. CAG:312
  REGION 1..152: note = MG1-242 HNH domain

SEQ ID NO: 3873 - protein, 158 aa, unidentified; identical to SEQ ID NO: 3786
  REGION 1..158: note = Description of Unknown: uncultivated organism with predicted taxonomy: Verrucomicrobia
  REGION 1..158: note = MG1-243 HNH domain

SEQ ID NO: 3874 - protein, 152 aa, unidentified; identical to SEQ ID NO: 3692
  REGION 1..152: note = Description of Unknown: uncultivated organism with predicted taxonomy: unclassified Verrucomicrobia (miscellaneous)
  REGION 1..152: note = MG1-244 HNH domain

SEQ ID NO: 3875 - protein, 152 aa, unidentified; identical to SEQ ID NO: 3716
  REGION 1..152: note = Description of Unknown: uncultivated organism with predicted taxonomy: Coraliomargarita sp. CAG:312
  REGION 1..152: note = MG1-245 HNH domain

SEQ ID NO: 3876 - protein, 152 aa, unidentified; identical to SEQ ID NO: 3752
  REGION 1..152: note = Description of Unknown: uncultivated organism with predicted taxonomy: unclassified Verrucomicrobia (miscellaneous)
  REGION 1..152: note = MG1-246 HNH domain

SEQ ID NO: 3877 - protein, 152 aa, unidentified; identical to SEQ ID NO: 3716
  REGION 1..152: note = Description of Unknown: uncultivated organism with predicted taxonomy: Coraliomargarita sp. CAG:312
  REGION 1..152: note = MG1-247 HNH domain

SEQ ID NO: 3878 - protein, 152 aa, unidentified; identical to SEQ ID NO: 3782
  REGION 1..152: note = Description of Unknown: uncultivated organism with predicted taxonomy: unclassified Verrucomicrobia (miscellaneous)
  REGION 1..152: note = MG1-248 HNH domain

SEQ ID NO: 3879 - protein, 152 aa, unidentified; identical to SEQ ID NO: 3692
  REGION 1..152: note = Description of Unknown: uncultivated organism with predicted taxonomy: unclassified Verrucomicrobia (miscellaneous)
  REGION 1..152: note = MG1-249 HNH domain

SEQ ID NO: 3880 - protein, 152 aa, unidentified; identical to SEQ ID NO: 3716
  REGION 1..152: note = Description of Unknown: uncultivated organism with predicted taxonomy: Coraliomargarita sp. CAG:312
  REGION 1..152: note = MG1-250 HNH domain

SEQ ID NO: 3881 - protein, 152 aa, unidentified; identical to SEQ ID NO: 3716
  REGION 1..152: note = Description of Unknown: uncultivated organism with predicted taxonomy: Coraliomargarita sp. CAG:312
  REGION 1..152: note = MG1-251 HNH domain

SEQ ID NO: 3882 - protein, 152 aa, unidentified; identical to SEQ ID NO: 3774
  REGION 1..152: note = Description of Unknown: uncultivated organism with predicted taxonomy: unclassified Verrucomicrobia (miscellaneous)
  REGION 1..152: note = MG1-252 HNH domain

SEQ ID NO: 3883 - protein, 152 aa, unidentified; identical to SEQ ID NO: 3692
  REGION 1..152: note = Description of Unknown: uncultivated organism with predicted taxonomy: unclassified Verrucomicrobia (miscellaneous)
  REGION 1..152: note = MG1-253 HNH domain

SEQ ID NO: 3884 - protein, 152 aa, unidentified; identical to SEQ ID NO: 3692
  REGION 1..152: note = Description of Unknown: uncultivated organism with predicted taxonomy: unclassified Verrucomicrobia (miscellaneous)
  REGION 1..152: note = MG1-254 HNH domain

SEQ ID NO: 3885 - protein, 152 aa, unidentified; identical to SEQ ID NO: 3692
  REGION 1..152: note = Description of Unknown: uncultivated organism with predicted taxonomy: unclassified Verrucomicrobia (miscellaneous)
  REGION 1..152: note = MG1-255 HNH domain

SEQ ID NO: 3886 - protein, 152 aa, unidentified; identical to SEQ ID NO: 3692
  REGION 1..152: note = Description of Unknown: uncultivated organism with predicted taxonomy: unclassified Verrucomicrobia (miscellaneous)
  REGION 1..152: note = MG1-256 HNH domain

SEQ ID NO: 3887 - protein, 152 aa, unidentified; identical to SEQ ID NO: 3692
  REGION 1..152: note = Description of Unknown: uncultivated organism with predicted taxonomy: unclassified Verrucomicrobia (miscellaneous)
  REGION 1..152: note = MG1-257 HNH domain

SEQ ID NO: 3888 - protein, 158 aa, unidentified; identical to SEQ ID NO: 3723
  REGION 1..158: note = Description of Unknown: uncultivated organism with predicted taxonomy: Verrucomicrobia
  REGION 1..158: note = MG1-258 HNH domain

SEQ ID NO: 3889 - protein, 152 aa, unidentified; identical to SEQ ID NO: 3692
  REGION 1..152: note = Description of Unknown: uncultivated organism with predicted taxonomy: unclassified Verrucomicrobia (miscellaneous)
  REGION 1..152: note = MG1-259 HNH domain

SEQ ID NO: 3890 - protein, 152 aa, unidentified; identical to SEQ ID NO: 3764
  REGION 1..152: note = Description of Unknown: uncultivated organism with predicted taxonomy: unclassified Verrucomicrobia (miscellaneous)
  REGION 1..152: note = MG1-260 HNH domain

SEQ ID NO: 3891 - protein, 152 aa, unidentified; identical to SEQ ID NO: 3692
  REGION 1..152: note = Description of Unknown: uncultivated organism with predicted taxonomy: unclassified Verrucomicrobia (miscellaneous)
  REGION 1..152: note = MG1-261 HNH domain

SEQ ID NO: 3892 - protein, 152 aa, unidentified; identical to SEQ ID NO: 3641
  REGION 1..152: note = Description of Unknown: uncultivated organism with predicted taxonomy: unclassified Verrucomicrobia (miscellaneous)
  REGION 1..152: note = MG1-262 HNH domain

SEQ ID NO: 3893 - protein, 152 aa, unidentified; identical to SEQ ID NO: 3788
  REGION 1..152: note = Description of Unknown: uncultivated organism with predicted taxonomy: Verrucomicrobia
  REGION 1..152: note = MG1-263 HNH domain

SEQ ID NO: 3894 - protein, 152 aa, unidentified; identical to SEQ ID NO: 3641
  REGION 1..152: note = Description of Unknown: uncultivated organism with predicted taxonomy: unclassified Verrucomicrobia (miscellaneous)
  REGION 1..152: note = MG1-264 HNH domain

SEQ ID NO: 3895 - protein, 152 aa, unidentified; identical to SEQ ID NO: 3794
  REGION 1..152: note = Description of Unknown: uncultivated organism with predicted taxonomy: unclassified Verrucomicrobia (miscellaneous)
  REGION 1..152: note = MG1-265 HNH domain

SEQ ID NO: 3896 - protein, 152 aa, unidentified; identical to SEQ ID NO: 3716
  REGION 1..152: note = Description of Unknown: uncultivated organism with predicted taxonomy: Coraliomargarita sp. CAG:312
  REGION 1..152: note = MG1-266 HNH domain

SEQ ID NO: 3897 - protein, 158 aa, unidentified; identical to SEQ ID NO: 3740
  REGION 1..158: note = Description of Unknown: uncultivated organism with predicted taxonomy: Verrucomicrobia
  REGION 1..158: note = MG1-267 HNH domain

SEQ ID NO: 3898 - protein, 152 aa, unidentified; identical to SEQ ID NO: 3692
  REGION 1..152: note = Description of Unknown: uncultivated organism with predicted taxonomy: Verrucomicrobia
  REGION 1..152: note = MG1-268 HNH domain

SEQ ID NO: 3899 - protein, 152 aa, unidentified; identical to SEQ ID NO: 3692
  REGION 1..152: note = Description of Unknown: uncultivated organism with predicted taxonomy: unclassified Verrucomicrobia (miscellaneous)
  REGION 1..152: note = MG1-269 HNH domain

SEQ ID NO: 3900 - protein, 152 aa, unidentified; identical to SEQ ID NO: 3733
  REGION 1..152: note = Description of Unknown: uncultivated organism with predicted taxonomy: Verrucomicrobia
  REGION 1..152: note = MG1-270 HNH domain

SEQ ID NO: 3901 - protein, 152 aa, unidentified; identical to SEQ ID NO: 3692
  REGION 1..152: note = Description of Unknown: uncultivated organism with predicted taxonomy: unclassified Verrucomicrobia (miscellaneous)
  REGION 1..152: note = MG1-271 HNH domain

SEQ ID NO: 3902 - protein, 183 aa, unidentified
  REGION 1..183: note = Description of Unknown: uncultivated organism
  REGION 1..183: note = MG1-272 HNH domain
ELEQDAEAAQDAWERRKKDREENQTARATLKDMGVKAPTDKDVRKFRLLQECKWRCPYTLERFMQTEFDDLVIQRIVPPAGDPRRSAYLEAARSAMQGTQVEHMVPQAAIVCDEWFNVTVTRPTTNTTKGDRTPYDFVLRDGDKDRRKQLLENAEQCFGKDSLKFKIFSSDNARSLIQERDKL

SEQ ID NO: 3903 - protein, 185 aa, unidentified
  REGION 1..185: note = Description of Unknown: uncultivated organism with predicted taxonomy: Rhizobiales
  REGION 1..185: note = MG1-273 HNH domain
DLMMNQEQKDAKEAKDKERRKERDEAAQILRDMGFAPDADNIKKFLLAQEAGWRCPFTLRPFCQSDFSQLTVTQLIQAENKPRFVKEASSVFDRLEIEHLVPRTPVVCNEWFNLTVTLHSTNAQKRKRTPFQWLFADKDGLPADLDWERIRKNAVERFGESSLKYQVFTSPDGAKLVEDNAKKSI

SEQ ID NO: 3904 - protein, 185 aa, unidentified
  REGION 1..185: note = Description of Unknown: uncultivated organism
  REGION 1..185: note = MG1-274 HNH domain
DLMMNQKQKDAKEAKDRERRDERDKAAQILRDMGYAPTADNIKKFLLAQEVGWRCPFTLQAFCQSDFSRLTITQLAQAENKPRFLKEASSVFRRLEVEHLVPRTPVVCNEWYNLTVTLHSTNAQKGKRTPFQWLSIDKDGVPPDLDWDCACKNAADRFGANSLKYQIFTSPNAAEIIADNAKRSI

SEQ ID NO: 3905 - protein, 161 aa, unidentified; identical to SEQ ID NO: 3650
  REGION 1..161: note = Description of Unknown: uncultivated organism
  REGION 1..161: note = MG1-275 HNH domain

SEQ ID NO: 3906 - protein, 151 aa, unidentified
  REGION 1..151: note = Description of Unknown: uncultivated organism with predicted taxonomy: Verrucomicrobia bacterium IMCC26134
  REGION 1..151: note = MG1-276 HNH domain
EDFMGQKAKLEYLKFQRERARARAEAREEAAKAGATENSAGLKMELHKAQGGICLYTGDGLAVTSLDDYDIDHIVPESQGGPDALLNKVLTTRLANREKANRTPYEWLASSDRWDAYVERGKKRLTTLRNKKVQLLTSPEATALVEKYTAL

SEQ ID NO: 3907 - protein, 153 aa, unidentified
  REGION 1..153: note = Description of Unknown: uncultivated organism
  REGION 1..153: note = MG1-277 HNH domain
SLALGKTKKRELIQRIHNNREERDGIRKELSKDGFSSSKNSILRYRLFKEAKGRCPFCLCPFCLQAVLFKEAEIEHIVPRSRVDCNEFYNLTVAHADCNKKKDNRTPWEAFGQTPDWEALRRNAEECFGLGSMKYKLFTNPDAQDLVEEKSDL

SEQ ID NO: 3908 - protein, 108 aa, unidentified
  REGION 1..108: note = Description of Unknown: uncultivated organism with predicted taxonomy: Pedosphaera sp. Tous-C6FEB
  REGION 1..108: note = MG1-278 HNH domain
EDFMGEEAVKKYQRFLNDRADERKKAREEAEKLGLESRSSGLRYELFKAQGGICLYTGKSLGETSLDDYEIDHIVPRSLGVPDAALNYVLTFHDVNHAKEKGKLTPYA

SEQ ID NO: 3909 - protein, 151 aa, unidentified
  REGION 1..151: note = Description of Unknown: uncultivated organism
  REGION 1..151: note = MG1-279 HNH domain
SLALGQKAKNELNQRNEKFRKERENAREQLSSNKESFSRKAIQRYRLWQEAKGRCPFCLQMIERTELGHGADIEHLVPRSIVDCNEFYNLTVAHIKCNRELKGDRTPFAAFSGTSQWPDIKDHAEKTFFGRKLEIFLSPDAEQLIEQKSDL

SEQ ID NO: 3910 - protein, 183 aa, unidentified; identical to SEQ ID NO: 3902
  REGION 1..183: note = Description of Unknown: uncultivated organism
  REGION 1..183: note = MG1-280 HNH domain

SEQ ID NO: 3911 - protein, 153 aa, unidentified; identical to SEQ ID NO: 3907
  REGION 1..153: note = Description of Unknown: uncultivated organism with predicted taxonomy: Thermoflexibacter ruber
  REGION 1..153: note = MG1-281 HNH domain

SEQ ID NO: 3912 - protein, 153 aa, unidentified; identical to SEQ ID NO: 3907
  REGION 1..153: note = Description of Unknown: uncultivated organism
  REGION 1..153: note = MG1-282 HNH domain

SEQ ID NO: 3913 - protein, 158 aa, unidentified
  REGION 1..158: note = Description of Unknown: uncultivated organism with predicted taxonomy: Verrucomicrobia bacterium IMCC26134
  REGION 1..158: note = MG1-283 HNH domain
EDFMGEKAKRELKDFQDKREAARKKAREKATAAGSEEKSAALKFELCEAQGFICLYCGQPFATTKLNECRIEHIVPTAQGGPDAMVNYVAAHDECNEAKGKQTPFQWWHHNTSGKAPTISWDGYKALVDKYATTLRNKKVQLLTREDAVELVGRYTAL

SEQ ID NO: 3914 - protein, 153 aa, unidentified
  REGION 1..153: note = Description of Unknown: uncultivated organism
  REGION 1..153: note = MG1-284 HNH domain
SLAMGEKKRREHIQRIKENRDERESIRTELKKDNFSSSKNSILRYRLFKEAKGRCPFCLCPFCLQEVVYKEAEIEHIVPRSRVDCNEFYNLTVAHQECNKKKDSRTPWEAYGTTKDWEALRKNAEDCFGLGSLKYRLFTNPDAQNLVEEKSDL

SEQ ID NO: 3915 - protein, 153 aa, unidentified
  REGION 1..153: note = Description of Unknown: uncultivated organism with predicted taxonomy: Verrucomicrobia
  REGION 1..153: note = MG1-285 HNH domain
EDFMGKKAKIEYFSFIKRRAEERIKAREEAANAGATEKSAGLKLELLRAQDGCCLYTNEGLVPSRLDEYQIDHIVPRSKGGPDAVVNYALTTQKANEAKADRTPYDWFHQEMPDKWDAYVNRVRSRATHLRNKKVQLLVALNAAELADKYTAL

SEQ ID NO: 3916 - protein, 153 aa, unidentified; identical to SEQ ID NO: 3642
  REGION 1..153: note = Description of Unknown: uncultivated organism with predicted taxonomy: Verrucomicrobia
  REGION 1..153: note = MG1-287 HNH domain

SEQ ID NO: 3917 - protein, 153 aa, unidentified; identical to SEQ ID NO: 3642
  REGION 1..153: note = Description of Unknown: uncultivated organism
  REGION 1..153: note = MG1-288 HNH domain

SEQ ID NO: 3918 - protein, 47 aa, unidentified
  REGION 1..47: note = Description of Unknown: uncultivated organism with predicted taxonomy: Pedosphaera sp. Tous-C6FEB
  REGION 1..47: note = MG1-289 HNH domain
EDFMGEEAKREYQNFINEREKDRKAAREEAGKLGFDSRSSGLRYELW

SEQ ID NO: 3919 - protein, 151 aa, unidentified
  REGION 1..151: note = Description of Unknown: uncultivated organism with predicted taxonomy: Deltaproteobacteria bacterium RIFOXYA12_FULL_61_11
  REGION 1..151: note = MG1-290 HNH domain
SLGLGKKANDDLKKKQATQREEREAARQEAAEHHAAGSQAVLRFRLAKEVGKVCPYCHQPFHADLADAEIEHILPRALGGSDQQVNLTVAHTHCNHEKHDQLPHAAWGEADRWPCLERFAREHFKGLKLQLFLHQGNPEEALALLAPPADL

SEQ ID NO: 3920 - protein, 149 aa, unidentified
  REGION 1..149: note = Description of Unknown: uncultivated organism with predicted taxonomy: Candidatus Termititenax aidoneus
  REGION 1..149: note = MG1-291 HNH domain
EDFMGDKKRREYIKIMNQRRKAKDEAFNEIKDLVKGKQSLIKQLLLKEQGCKDIYSYETLIPSQLNDYEIDHIVPRSKGGSDAMYNKVLTKASNNQEKGNRIPFEWLSADKEKWNMFYKNVESFRLNWKKKELLLAKDPTLLIEKYTTL

SEQ ID NO: 3921 - protein, 155 aa, unidentified
  REGION 1..155: note = Description of Unknown: uncultivated organism with predicted taxonomy: Candidatus Termititenax aidoneus
  REGION 1..155: note = MG1-292 HNH domain
DEFMGKQAKEDYYKFIKEQTKERKIVVEELEKAGFSKPSGEMIRKMMLFRQQDGIDFYSMQNIKLSHLGEYEIDHVIPRSRGGSDAFYNIILTTNKNNSAKGDKTPYEWLGKGDIWDNISEKLKVNKKMGSKKKLLFMASSEEQYKLLIDKYTQL

SEQ ID NO: 3922 - protein, 155 aa, unidentified; identical to SEQ ID NO: 3921
  REGION 1..155: note = Description of Unknown: uncultivated organism with predicted taxonomy: Elusimicrobia bacterium HGW-Elusimicrobia-1
  REGION 1..155: note = MG1-293 HNH domain

SEQ ID NO: 3923 - protein, 157 aa, unidentified
  REGION 1..157: note = Description of Unknown: uncultivated organism with predicted taxonomy: Endomicrobium proavitum
  REGION 1..157: note = MG1-294 HNH domain
EDFAGEEKRKEYIDTQNKNTKNIELAVKLLKEANKQLNNRNILKARLLIEQNNVDLYEIDEHRKISITNIDDYEIDHIIPRSRGGSDSFSNFVITSINNNQTKLNRTPYEWFHQDKSFDAWNTYIKNIEGIKGLSKHKIKLLISDKAIELENKKTDL

SEQ ID NO: 3924 - protein, 149 aa, unidentified
  REGION 1..149: note = Description of Unknown: uncultivated organism with predicted taxonomy: Verrucomicrobia bacterium 12-59-8
  REGION 1..149: note = MG1-295 HNH domain
EDFMGEEAKKKLQKFQNENRKAWDQARSQARELNLSGGGNVRKLRMLREQNFICPYTGDTLSENEVDTLEVEHIVPRARGGSDNQYNKVVTRTRTNREKGDHTPYEWLTQKEEFAAFCERVEKMGLSRKKKEILTAKDPFTLDQKWDSL

SEQ ID NO: 3925 - protein, 166 aa, unidentified
  REGION 1..166: note = Description of Unknown: uncultivated organism
  REGION 1..166: note = MG1-296 HNH domain
EEFLGEDKRAQYIKTQNENRKDKDLAKEELMTVIKSADPSYQTKLLKVRLLREQHYKDVYDLTENCALSIQDIDDYDIDHIVPISCGGADSMVNKVLTKKELNETKKQNQTPYEMYFQNASAETWAKYLEHLKDVYGKNISKHLEKKYELLTSDKAIEIESKRNDL

SEQ ID NO: 3926 - protein, 149 aa, unidentified
  REGION 1..149: note = Description of Unknown: uncultivated organism with predicted taxonomy: Verrucomicrobia bacterium 12-59-8
  REGION 1..149: note = MG1-297 HNH domain
EDFMGEEAKEKPKKFQNENRKAWDQARSQARELNLSGGGNVRKLRMLREQNFICPYTGDTLSENEVDTLEVEHIVPRARGGSDNQYNKVVTRSQTNREKGDHTPYEWLTQKGEFAAFCERVEKMGLSRKKKEILTAKDPFTLDQKWDSL

SEQ ID NO: 3927 - protein, 158 aa, unidentified
  REGION 1..158: note = Description of Unknown: uncultivated organism
  REGION 1..158: note = MG1-298 HNH domain
DEFLSEEEKADLNRANKERQKNNKKAYEELKKYGLEISHDNMEKYKLCESQKWTDIYNVFDDKKKISPEDLPNYDIDHIVPVSSGGADSLANKVVTARHLNQSQKSNKTPYQWLFEDKIKWADFLENIKNAGIDKNSKKYLFLTAKDAVSQAKSLNDL

SEQ ID NO: 3928 - protein, 154 aa, unidentified
  REGION 1..154: note = Description of Unknown: uncultivated organism
  REGION 1..154: note = MG1-299 HNH domain
EDFMGDKARMELKKFQNDRAKARAEARERVAELGISEKNSLRYELWKAQGGRCLYTDDPLAETELDNYHVDHIVPRAKGGPDSRLNYVLTLNQTNDDKDDRTPFEWLSCNPARWLAYVNRVESRLKAADGISRKTAQLLTLPNAVELAEKYTAL

SEQ ID NO: 3929 - protein, 154 aa, unidentified
  REGION 1..154: note = Description of Unknown: uncultivated organism
  REGION 1..154: note = MG1-300 HNH domain
EDFMGEEAKKRYLKFMNDRAKSRAEAREKVAALGISDKNILRYELWKSQGCRCLYTDLPLEETKLDDYKVDHIVPRAQGGPDSRLNYALTHNATNDEKDDRTPYEWLSGDSVKWQAYLNRVNARLKAADGISRKTAQLLTLPNAAELAEKYTAL

SEQ ID NO: 3930 - protein, 154 aa, unidentified
  REGION 1..154: note = Description of Unknown: uncultivated organism
  REGION 1..154: note = MG1-301 HNH domain
EDFMGEKARMELRNFQNRRAKARAEARERVAELGISEKNSLRYELFKAQGGRCLYTDDPLAETELDNYRVDHIVPRAKGGPDSRLNYALTLNQTNDDKGDRTPYEWLSGNPVRWQAYLNRVEARLKTTDGISRKTAQLLTLPNAVELAEKYTAL

SEQ ID NO: 3931 - protein, 154 aa, unidentified
  REGION 1..154: note = Description of Unknown: uncultivated organism
  REGION 1..154: note = MG1-302 HNH domain
EDFMGDKARKELQKFQNDRAKARAEARERVAELGISEKNSLRYELWKAQGGRCLYNDDPLAETDLDNYHVDHIVPRAKGGPDSRLNYALTLNQTNDDKGDRTPYEWLSGNPVRWQAYLNRVEARLKAADGISRKTAQLLTLPNAAELAEKYTAL

SEQ ID NO: 3932 - protein, 154 aa, unidentified; identical to SEQ ID NO: 3931
  REGION 1..154: note = Description of Unknown: uncultivated organism
  REGION 1..154: note = MG1-303 HNH domain

SEQ ID NO: 3933 - protein, 160 aa, unidentified
  REGION 1..160: note = Description of Unknown: uncultivated organism with predicted taxonomy: Verrucomicrobia
  REGION 1..160: note = MG1-304 HNH domain
NDKDNSLEGQKRTQVYQDILKRNEDRRETARKALRASSLPDSDEMVVRWLLYQEQGPFCIYSGQPIRCSELPNLQIEHIVPRALGGPDAYWNWVLCKTDQNVEKGNRVPYQWFHEEKKSGEWEDYRRRVRNRATWLGSRKVDLLLRADAKELVGEKYTAL

SEQ ID NO: 3934 - protein, 154 aa, unidentified
  REGION 1..154: note = Description of Unknown: uncultivated organism with predicted taxonomy: Verrucomicrobia bacterium IMCC26134
  REGION 1..154: note = MG1-305 HNH domain
EDFMGDKARMELKKFQNDRAKARAEARERVAELGISEKNSLRYELWKAQGGRCLYMDDPLAETELDNYRIDHIVPRAKCGPDSRLNYALTLNQTNDDKGDRTPYEWLSGNPERWRAYLNRVEARLRAADGISRKTAQLLTLPNAVELAEKFTAL

SEQ ID NO: 3935 - protein, 151 aa, unidentified
  REGION 1..151: note = Description of Unknown: uncultivated organism with predicted taxonomy: Verrucomicrobia
  REGION 1..151: note = MG1-306 HNH domain
EDFMGKKAKIEYFKFQRDRAAQRAKAREEAAKAGAGEGAAGLKMELLEAQGGACLYTGEALAPTSLDDYVIDHIVPRAKGGPDSALNYVLTTRRANDDKADRTPHEWLSATNGWDAYVERVKKRTTALRNKKASLLVSPEAETLVQRYTAL

SEQ ID NO: 3936 - protein, 185 aa, unidentified; identical to SEQ ID NO: 3904
  REGION 1..185: note = Description of Unknown: uncultivated organism with predicted taxonomy: Verrucomicrobia bacterium IMCC26134
  REGION 1..185: note = MG1-307 HNH domain

SEQ ID NO: 3937 - protein, 172 aa, unidentified
  REGION 1..172: note = Description of Unknown: uncultivated organism
  REGION 1..172: note = MG1-308 HNH domain
DPPRNKKEQDARASLNVENREFIENLLKDYGYEGAHSRSLINRLKLYRQQGGEAKDGQVTKEAVCPFTGMPLGKNPLSSDLDLAHLFPDGRGGLAIEDNLVLTKRSVNQDMGQRTPREVAGTRMGKTSFLSWNEMLARSKSFKWNDKKRELFAFEPAKGQPVPDFENLTRTA

SEQ ID NO: 3938 - protein, 154 aa, unidentified
  REGION 1..154: note = Description of Unknown: uncultivated organism
  REGION 1..154: note = MG1-309 HNH domain
DMPRNQDQSREIQKEQKERREERRHIAAIYGLDFDVLTEPQKRRLFLFHEQAGRDGEAVCPYTGESLGRDPLAADLEIEHIYPQRRGGLSIMENLAITRRATNAEKGNRTPVEWLGYEKAAEQASRMRWSKRKLEVFLWREERCPDWENLTRTA

SEQ ID NO: 3939 - protein, 167 aa, unidentified
  REGION 1..167: note = Description of Unknown: uncultivated organism
  REGION 1..167: note = MG1-310 HNH domain
DPPRNAQQRAERQKEIEANREKHEKLFEQYGIEDSGVASKRRRIMLYEQQRGKCPYTGKDLPSNPLDPSLEIEHIFPAEMGGLSVDDNLVLTWRSVNAEKGKRTPLQWAGERFDAMLANTRDMRWSARKREIFAWGTIREDKPDKPSHYNADGTLRVPDFGNTTRTA

SEQ ID NO: 3940 - protein, 171 aa, unidentified
  REGION 1..171: note = Description of Unknown: uncultivated organism
  REGION 1..171: note = MG1-311 HNH domain
DAPRTSRQAQEIKSAQDERGQKRRELFAAHNLEDSGIASKRRRISLWDQQKGVCPYTGKELPKDPLDPALELEHIFPAEMGGLSTDENLVLTWRTVNGDKGKHTPLQFASKLGVPFDQLVAHTKEMRWSGKKREIFAWGTLREAKDDQKSHYLPDGVTLRVPDFGKTTRTA

SEQ ID NO: 3941 - protein, 171 aa, unidentified; identical to SEQ ID NO: 3940
  REGION 1..171: note = Description of Unknown: uncultivated organism
  REGION 1..171: note = MG1-312 HNH domain

SEQ ID NO: 3942 - protein, 172 aa, unidentified; identical to SEQ ID NO: 3937
  REGION 1..172: note = Description of Unknown: uncultivated organism
  REGION 1..172: note = MG1-314 HNH domain

SEQ ID NO: 3943 - protein, 171 aa, unidentified
  REGION 1..171: note = Description of Unknown: uncultivated organism with predicted taxonomy: Verrucomicrobia bacterium
  REGION 1..171: note = MG1-315 HNH domain
DAPRTTKQAQEIKFAQDERGQKRRELFAARNLEDSGVASKRRRISLWDQQKGVCPYTGNELPKDPLDPSLELEHIFPAEMGGLSTDENLVLTSRTVNSDKGKHTPLQFANKLRVPFDQLVAHTQDMRWSAKKREIFAWGTLREDKDDQKSHYLPDGVSLRVPDFGNTTRTA

SEQ ID NO: 3944 - protein, 185 aa, unidentified; identical to SEQ ID NO: 3904
  REGION 1..185: note = Description of Unknown: uncultivated organism with predicted taxonomy: Thiorhodospira sibirica
  REGION 1..185: note = MG1-316 HNH domain

SEQ ID NO: 3945 - protein, 170 aa, unidentified
  REGION 1..170: note = Description of Unknown: uncultivated organism
  REGION 1..170: note = MG1-317 HNH domain
DPPRNALQRAERDQEMKERREKRNKLFEQHHLDDSGVASRRRRVTLWEQQKGKCPFTGKELPANPLDPSLELEHIFPEDMGGLSVEENLALTWRTVNADKGKRTPLQFAAKLGVPFDQLMAHTQEMRWSAKKREIFAWGAIKEDRGDQASHYNPDGALRIPDFGNITRMA

SEQ ID NO: 3946 - protein, 171 aa, unidentified; identical to SEQ ID NO: 3940
  REGION 1..171: note = Description of Unknown: uncultivated organism
  REGION 1..171: note = MG1-318 HNH domain

SEQ ID NO: 3947 - protein, 153 aa, unidentified
  REGION 1..153: note = Description of Unknown: uncultivated organism with predicted taxonomy: Verrucomicrobia bacterium IMCC26134
  REGION 1..153: note = AKC83434.1 HNH domain
TDFMGPKAKLALAKFQSERAEAREDARAQVGKIGADGRASPLKYELWKAQGGICLFVGESLAPTDIESLEIEHIVPRSQGGSDAFINYVVTTKATNKLKDNRTPYAWFEANGFTGWDAYVKRVEACATALRNKKVRLLTAPDAIELVERYTAL

SEQ ID NO: 3948 - protein, 153 aa, unidentified; identical to SEQ ID NO: 3947
  REGION 1..153: note = Description of Unknown: uncultivated organism with predicted taxonomy: Verrucomicrobia bacterium IMCC26134
  REGION 1..153: note = AKC83434.1 HNH domain

SEQ ID NO: 3949 - protein, 151 aa, unidentified
  REGION 1..151: note = Description of Unknown: uncultivated organism with predicted taxonomy: Verrucomicrobia bacterium 61-8
  REGION 1..151: note = OJV06180.1 HNH domain
EDFMGKKAVIEYRAFLKKREAERKRAREDAAKTGSTERSAALKLELLREQGGICLYTGSALKETALEQYEIDHIVPRSKGGPDAVINYVLTLRSANDEKGDRTPFEWLSRTNQWDAYVQRVDSRGTVLRNKKTKLLLNENASELAERYTAL

SEQ ID NO: 3950 - protein, 151 aa, unidentified; identical to SEQ ID NO: 3949
  REGION 1..151: note = Description of Unknown: uncultivated organism with predicted taxonomy: Verrucomicrobia bacterium 61-8
  REGION 1..151: note = OJV06180.1 HNH domain

SEQ ID NO: 3951 - protein, 168 aa, unidentified
  REGION 1..168: note = Description of Unknown: uncultivated organism with predicted taxonomy: Pedosphaera sp. Tous-C6FEB
  REGION 1..168: note = PAW75411.1 HNH domain
EDFMGEKALAELQDFQRRREADRKEAKEMAAAAGATSSLSALKYQLWKAQGGECLYGKEVFNESGVSKAQCLYRGTALPFTKLDDYVIDHIVPRAKGGPDAMVNYVLTTHETNEAKGDRTPFEWLRSAPDWDAYNKRVAARAHTLRNKKVQLLTREDAPELVQRYTAL

SEQ ID NO: 3952 - protein, 168 aa, unidentified; identical to SEQ ID NO: 3951
  REGION 1..168: note = Description of Unknown: uncultivated organism with predicted taxonomy: Pedosphaera sp. Tous-C6FEB
  REGION 1..168: note = PAW75411.1 HNH domain

SEQ ID NO: 3953 - protein, 153 aa, unidentified; identical to SEQ ID NO: 3947
  REGION 1..153: note = Description of Unknown: uncultivated organism with predicted taxonomy: Verrucomicrobia bacterium IMCC26134
  REGION 1..153: note = WP_082083265.1 HNH domain

SEQ ID NO: 3954 - protein, 153 aa, unidentified; identical to SEQ ID NO: 3947
  REGION 1..153: note = Description of Unknown: uncultivated organism with predicted taxonomy: Verrucomicrobia bacterium IMCC26134
  REGION 1..153: note = WP_082083265.1 HNH domain

SEQ ID NO: 3955 - protein, 157 aa, unidentified; identical to SEQ ID NO: 3711
  REGION 1..157: note = Description of Unknown: uncultivated organism
  REGION 1..157: note = MG2-1 HNH domain

SEQ ID NO: 3956 - protein, 185 aa, unidentified
  REGION 1..185: note = Description of Unknown: uncultivated organism
  REGION 1..185: note = MG2-7 HNH domain
ELQEFSGLNSKEITHKLNEKLGNFRSVVKNLEEAIANSEERVAITGSLIRKARILEDQGFVCPYTGTHLSYNHLLADRLEIEHIIPRSLRPSDALSSCVMTFRSVNDMKGQRTAMQFICEEQGREVPGHENIQITTKKAYVDYVAKHKKQYPQKSDDRRRCERRAELMLMERYDQRNADFTERDL

SEQ ID NO: 3957 - protein, 210 aa, unidentified
  REGION 1..210: note = Description of Unknown: uncultivated organism
  REGION 1..210: note = MG2-3 HNH domain
DILTFSGLERKQLSGQVMPSLREHHDHVVRLLQQELKGTQWENKIDGELIWKAKIADDLGWWCPYTGKKYSPCELASGEMDVDHIIPKSRRLTNAMSAVVVTFKTINNLKGDLTAWEFVERYQDQPVGPHGEKVRKLWDYERFVKNPDNEMDKPRLSGETGHSDYPRWPKYLPGSRRKLHPDYVRRKLRRRYLLLKHYEKDKDTFTPRDL

SEQ ID NO: 3958 - protein, 195 aa, unidentified
  REGION 1..195: note = Description of Unknown: uncultivated organism with predicted taxonomy: Verrucomicrobia
  REGION 1..195: note = MG2-5 HNH domain
DLREMSGKSNYDKQADLNNRVKNHHSVVEYLHEHLPAKYHNRINGSLIRKARVAADLDWKCPYTNEAIQPIHLITKVVDLDHVVPHALRPSDGLDSLVVTFCAVNKMKGKRTAWQFIKDEETRSVSYRNEQGKEEKVDGMPNLKIRFFSDYKKFVDDLKIKAKGEHKADAERRERRQQLLRLANYEEKAFLPRDL

SEQ ID NO: 3959 - protein, 179 aa, unidentified
  REGION 1..179: note = Description of Unknown: uncultivated organism with predicted taxonomy: Verrucomicrobia bacterium
  REGION 1..179: note = MG2-6 HNH domain
DLREFSGMTAKEIASELTKITSDHRKAVQYLEENLKGKPYKITASLIRKTRIAMDLDWTCPYTGQKYDIYDLLEKRVDLDHIIPQSIRPSNSLESLVITFPEVNRFKAQRLAFQFVKEEQTKTVKGLPNLQIRTLENYKNWGENLKESRFDRNKSPQSKRKKLLLLPEYVQEEFLPRDL

SEQ ID NO: 3960 - protein, 187 aa, unidentified
  REGION 1..187: note = Description of Unknown: uncultivated organism with predicted taxonomy: Verrucomicrobia
  REGION 1..187: note = MG2-8 HNH domain
DLREMSGKTAKEVAQDLGLRLANFKNVVKKLEGDESFMRELNQRGLHHIPPGIIRKARVAEDLGWRCPYTGMEYEPVHLLTRRVDKDHIIPHADRASDSLDSLVITFSAINAMKGKRTALQFVNEEQGKTVEDLPNLSIVSVNRYREFVEGLEAFRGHDDDRRRKKRRKDLLLLPSYEEKEFTPRDL

SEQ ID NO: 3961 - protein, 187 aa, unidentified; identical to SEQ ID NO: 3960
  REGION 1..187: note = Description of Unknown: uncultivated organism with predicted taxonomy: Verrucomicrobia
  REGION 1..187: note = MG2-10 HNH domain

SEQ ID NO: 3962 - protein, 193 aa, unidentified
  REGION 1..193: note = Description of Unknown: uncultivated organism
  REGION 1..193: note = MG2-11 HNH domain
DLREISGKTAKEKAQELGQRLANFKSVTKKLEEAFEGRNVHISPGLIRKARVAEDLGWTCPYTGQRYDPLDLLNAKVDKDHVIPRTERASDSLDSLVITFPAVNKWKDKRTALKFIEDEQGQPVLDMPNLSIKTFAQYEADVKALRPSFDPRPAKRDGRTKGPIDDDLRRWNRKQLLLNVRKWEEKEFLPRDL

SEQ ID NO: 3963 - protein, 187 aa, unidentified
  REGION 1..187: note = Description of Unknown: uncultivated organism with predicted taxonomy: Verrucomicrobia bacterium
  REGION 1..187: note = MG2-12 HNH domain
DVQTTSGMTNKEKAKELGSKIKHHHETAAWLAERLEDERDENGRRFVIGPSLIRKARIADDLGWECPYTGRKFEPADLIHRRYDKDHIVPRSKRLSDALEAMVITSCEVNREKKNRTALQFIKDMNLPENRAVRERLNIRTEAQFREFVDELKAKGSHADDVRRRKRRKELLLVQKYEEKEFTPADL

SEQ ID NO: 3964 - protein, 180 aa, unidentified
  REGION 1..180: note = Description of Unknown: uncultivated organism with predicted taxonomy: Verrucomicrobia bacterium
  REGION 1..180: note = MG2-13 HNH domain
DLREMSGKTAKEKAQDLGQRLANFKNVAEKLEEAFEGKDVHISPGLIRKARIAEDLGWTCPYTHHSYDAFQLLNRTVDKDHIIPRTERASDSLDSLVITFSAINKWKGKRTAMKFVEDEQGNPVPDMPNLSIVTLTHYKAFVEGLDTFRGHDDDKRRKKNRQRLLLVRDYEKPEFTPRDL

SEQ ID NO: 3965 - protein, 190 aa, unidentified
  REGION 1..190: note = Description of Unknown: uncultivated organism with predicted taxonomy: Verrucomicrobia bacterium
  REGION 1..190: note = MG2-14 HNH domain
DLVQFSGKTAKEKSQILGQQLWHHRKIVSYLEEERENTNGTWDINAGLIKKVRIADDMGWQCPYTGKTYSLNDIIHGEVDREHIIPRSSRPTDALHALTLTFRQINKEKGARTALQYIEDTRGESHTFSPKEFREFVGGLKNKNGPAKDDEVRCKKRKIALLTPIYERRGKVKQTDTGEEVLEAFTDGTL

SEQ ID NO: 3966 - protein, 190 aa, unidentified
  REGION 1..190: note = Description of Unknown: uncultivated organism with predicted taxonomy: Verrucomicrobia bacterium
  REGION 1..190: note = MG2-15 HNH domain
DLVQFSGKTAKEKSQILGQQLWHHRKIVSYLEEERENTNGTWDINAGLIKKVRIADDMGWQCPYTGKTYSLNDIIHGEVDREHIIPRSSRPTDALHALTLTFRQINKEKGARTALQYIEDPRGESHTFSPKEFREFVGRLKNKNGPAKDDEVRCKKRKIALLTPIYERRGKVKQTDTGEEVLEAFTDGTL

SEQ ID NO: 3967 - protein, 197 aa, unidentified
  REGION 1..197: note = Description of Unknown: uncultivated organism with predicted taxonomy: Verrucomicrobia bacterium
  REGION 1..197: note = MG2-16 HNH domain
DLREMSGKTAKEKAQYFRLLTADHHRVAEKLKKALAGQTVDGKPIRISASRIRKARVAEDLNWTCPYTGQKYEPIDLVTERVDEDHIVPRSQRMSDSLESLVISFSAVNKWKGKRTAMRFIKEEQGKPVPGLPNLSIVSLNRYLEFVDSLPPRNDPRKLKRHLKLLQPIDDDLRKWRRKELLKLEEYEQEEFTPRDL

SEQ ID NO: 3968 - protein, 210 aa, unidentified; identical to SEQ ID NO: 3957
  REGION 1..210: note = Description of Unknown: uncultivated organism
  REGION 1..210: note = MG2-17 HNH domain

SEQ ID NO: 3969 - protein, 185 aa, unidentified
  REGION 1..185: note = Description of Unknown: uncultivated organism with predicted taxonomy: Verrucomicrobia
  REGION 1..185: note = MG2-18 HNH domain
DLREFSGKTAKEKAQDLGLRIADHHRVAEKLQKALAGQTLNGQPIRIGPALIRKARIAEDLGWTCPYTGQKYEPIDLVTRRVDKDHIVPRSQRASDSLDSMVITFSAINKWKGKRTALKFVEDEQGKPVPDLPNLSIVSLSRYRDFVEKLDTFKGHDQDKKRKKRRKALLLVRDYEEEEFTPRDL

SEQ ID NO: 3970 - protein, 182 aa, unidentified
  REGION 1..182: note = Description of Unknown: uncultivated organism with predicted taxonomy: Verrucomicrobia
  REGION 1..182: note = MG2-19 HNH domain
DLREFSGMTAKEIESELNARSADFKKAKKQLEDMLLKAGLSNTRITATLIKKARIAQDLDFTCPYTGAKYELIDLINKQVDLEHIIPKSKRPSDSMESLVITFKEVNRWKGNRTALRFIKEEQNKPVQGKGNLMILTEKRYQELVNGLNTKGHPKDTERKKKRKELLLMEDYVEEEFLPRDL

SEQ ID NO: 3971 - protein, 180 aa, unidentified
  REGION 1..180: note = Description of Unknown: uncultivated organism with predicted taxonomy: Verrucomicrobia bacterium
  REGION 1..180: note = MG2-20 HNH domain
ELRDLSGKTRKEQEQDLGLRLGDFKRVAAKVEEACRRRGIPCTAGLIRKARVAEDLGWKCPYTGKEFSVDTLLDGVMDKDHIIPHADRQSDSLDSLVITWNEVNKWKGKRTALEFIREEGGKPVPGRPELTVMTLAEFQKHVASLDIRKGHDDDRARKKRRIRRLLTEYYEEKEFTPRDL

SEQ ID NO: 3972 - protein, 182 aa, unidentified
  REGION 1..182: note = Description of Unknown: uncultivated organism
  REGION 1..182: note = MG2-21 HNH domain
DLREFSGMTAKEIESELNARSADFKKAKKQLENMLQEAGLSNTRITATLIKKARIAQDLDFTCPYTGAKYELIDLINKQVDLEHIIPKSKRPSDSMESLVITFKEVNRWKGNRTALRFIKEEQNKPVPGKENLMILTEKRYQELVNGLNTKGHPKDTERKKKRKELLLMEDYVEEKFLPRDL

SEQ ID NO: 3973 - protein, 210 aa, unidentified; identical to SEQ ID NO: 3957
  REGION 1..210: note = Description of Unknown: uncultivated organism
  REGION 1..210: note = MG2-22 HNH domain

SEQ ID NO: 3974 - protein, 185 aa, unidentified
  REGION 1..185: note = Description of Unknown: uncultivated organism with predicted taxonomy: Verrucomicrobia bacterium
  REGION 1..185: note = MG2-23 HNH domain
DLREFSGKTAKEKTQDLGLRVADHHRVAEKLQKALAGQTVNGQPIRIGPGLIRKARIAEDLGWTCPYTGQKYEPIDLVTRRVDKDHIVPRSQRMSDSLDSLVITFSAINKWKGNRTALKFVEDEQGKPVPDLPNLSIVSLSRYREFVEKLETFKGHDDDKKRKKRRKALLLLRDYEEEEFTPRDL

SEQ ID NO: 3975 - protein, 180 aa, unidentified
  REGION 1..180: note = Description of Unknown: uncultivated organism with predicted taxonomy: Verrucomicrobia bacterium
  REGION 1..180: note = MG2-24 HNH domain
DLRDLSGKTRKEQEQDLGLRLGDFKRVAAKVEEACKRRNLRVTAGIIRKARVAEDLGWRCPYTGKEFCIDTLLDGVMDKEHIIPHADRQSDSLDSLVITWNEVNKWKGKRTAMEFIREEGGKPVPGRPELEIMSLAAFQKHVASLDTRKGHDDDRARKKRRIRRLLTEHYEEKEFTPRDL

SEQ ID NO: 3976 - protein, 185 aa, unidentified
  REGION 1..185: note = Description of Unknown: uncultivated organism
  REGION 1..185: note = MG2-25 HNH domain
DLREFSGMTRKAIEMDLGSRLKNFKSVSDKLEKAFDSQTYNGKPVQVTAGLIRKARIAEDLGWQCPYTGQSFEPVHLVSRAVDKDHVIPRSQRPSDSLESLVVTFSEVNKMKGQRTAWQFIQEFGGKPVEGMPNLMIRTPKQFEEFVTKLESFKGHEDDKRRKKRRKDLLLLPKFEDKGFVPRDL

SEQ ID NO: 3977 - protein, 180 aa, unidentified
  REGION 1..180: note = Description of Unknown: uncultivated organism with predicted taxonomy: Verrucomicrobia bacterium
  REGION 1..180: note = MG2-26 HNH domain
DLRELSGKTRKEQEQDLGQRLANFKSVVRKLEESFDGKKVKITPGLIRKARVAEDLGWTCPYTGKAYDAFDLLNRAVDKDHIIPRSQRASDSLDSLVITFAEVNKMKGKRTALRFIEEFQGQPVPGAPRLSLRTLRDYQQWVEGLETFKGHPDDQRRKKQRKKLLLLPEYVEKDFVPRDL

SEQ ID NO: 3978 - protein, 181 aa, unidentified
  REGION 1..181: note = Description of Unknown: uncultivated organism
  REGION 1..181: note = MG2-27 HNH domain
DLRSFSGMTAEEKKQEMGQRLGDFKKVVQKLRGDLPEVTAISAGLIRKARIAQDMNWTCPYTGMEYDALDLLHGHVDKDHIIPRSLRPSDSLDSLVLTLRTINEMKGQRTAVQFIKEFEGREVQDGKKRSLEILPWSQFQKLVESLDAKGIHDQDRARKKRRKALLLQEHYTEKEFVPKDL

SEQ ID NO: 3979 - protein, 180 aa, unidentified
  REGION 1..180: note = Description of Unknown: uncultivated organism with predicted taxonomy: Verrucomicrobia
  REGION 1..180: note = MG2-28 HNH domain
DLREMAGRTSQEIAKELGARVANHKKVANRLFGELPEGTRITGSLIRKARIADDLGWRCPYTGVEFEPVDLVEGRVDRDHIIPRSQRMSDSLDSLVITFSAVNKWKGQRTAWQFIQEEGGKPVPDAPNLSIVTPARFRDFVEHLDTKGHRDDYRRKKRRKELLLLERYEERTSGFTPGQL

SEQ ID NO: 3980 - protein, 182 aa, unidentified
  REGION 1..182: note = Description of Unknown: uncultivated organism with predicted taxonomy: Verrucomicrobia bacterium
  REGION 1..182: note = MG2-29 HNH domain
EVSSMSGKTMKLIKMEEGLKRSDHKKASKIMEAAVEESGENIRVGAGLIRKARVAQDLDWTCPYTGEKFDPLALIHSQVDLDHIIPRSERLSDAMAGLVVTFSEINRWKGARTAYQFISEEQGKQVPGKPNLSIMSLKAYEDFVGKLKISGGHDSDVGRRKARKGYLLLASYQDKEFTPRDL

SEQ ID NO: 3981 - protein, 182 aa, unidentified
  REGION 1..182: note = Description of Unknown: uncultivated organism with predicted taxonomy: Verrucomicrobia bacterium
  REGION 1..182: note = MG2-30 HNH domain
EISELSGKTTKEIKKEEGLKRAEHKKAREKMEAAVKDSGENIVITAGLIRKARIAQDLNWTCPFTGKEYDPIDLIHKQVDLDHIIPRAERLSDSMGGLVVTFSEVNRMKGKRTAWQFIQDEQGKPVKGKPVLSIRTMKNYETFVSKLKTFGGVKSDEARRKMRKQFLLMPDYKEKGFTPRDL

SEQ ID NO: 3982 - protein, 182 aa, unidentified; identical to SEQ ID NO: 3981
  REGION 1..182: note = Description of Unknown: uncultivated organism with predicted taxonomy: Verrucomicrobia bacterium
  REGION 1..182: note = MG2-31 HNH domain

SEQ ID NO: 3983 - protein, 182 aa, unidentified; identical to SEQ ID NO: 3981
  REGION 1..182: note = Description of Unknown: uncultivated organism with predicted taxonomy: Verrucomicrobia bacterium
  REGION 1..182: note = MG2-32 HNH domain

SEQ ID NO: 3984 - protein, 182 aa, unidentified; identical to SEQ ID NO: 3981
  REGION 1..182: note = Description of Unknown: uncultivated organism with predicted taxonomy: Verrucomicrobia bacterium
  REGION 1..182: note = MG2-33 HNH domain

SEQ ID NO: 3985 - protein, 182 aa, unidentified; identical to SEQ ID NO: 3981
  REGION 1..182: note = Description of Unknown: uncultivated organism with predicted taxonomy: Verrucomicrobia bacterium
  REGION 1..182: note = MG2-34 HNH domain

SEQ ID NO: 3986 - protein, 188 aa, unidentified
  REGION 1..188: note = Description of Unknown: uncultivated organism with predicted taxonomy: Thermogutta terrifontis
  REGION 1..188: note = MG2-35 HNH domain
DLVEFSGKSAKEKARILGQQLWHHRKISKFLEEEKAKNEGNWEISAGLIKKARIADDLNWICPYTGKQYSLNQIIHGDVDLEHIIPRSKRPTDALHALVLTFSHINREKGARTGLQYIEDTKDSPHTLTPEQYRKFVGRLKKNGPSKDDELRCTKRKIALLTQDYEPRGKAKEKSDSESVSGFTEGSL

SEQ ID NO: 3987 - protein, 183 aa, unidentified
  REGION 1..183: note = Description of Unknown: uncultivated organism with predicted taxonomy: Coraliomargarita sp. CAG:312
  REGION 1..183: note = MG2-36 HNH domain
DITAFSGLDSKKKAAKLNDLVAHHKSVSAYLKKEYPELSPNGSILRKARIADDLGWVCPYTGCHFSPRQLFESGNMEREHIIPRSLRPSDSLESLVITWKEVNDMKGQRTAYEFIKECQGMKVPGRQNLSIVTPERFEAFVRRLKKPMHPAGKADIERIKIRNKLLLTEHYKKREGGFLPSDL

SEQ ID NO: 3988 - protein, 183 aa, unidentified
  REGION 1..183: note = Description of Unknown: uncultivated organism with predicted taxonomy: Coraliomargarita sp. CAG:312
  REGION 1..183: note = MG2-37 HNH domain
DMGEFSGLDPKERAAKLNDLVCHHKSVSEYLEETYPELKISGSIIRKARIADDLGWVCPYTGRHFSPRELFESGNMELDHIIPYSLRPSNSLESLVATWKAVNEMKGQRCAAEFIKECQGMEVPGMPNVSIVTPERFEKFVSGLKKPQHNARYPDLKRIKKRNKLLLTLKYNKREGEFLPADL

SEQ ID NO: 3989 - protein, 183 aa, unidentified; identical to SEQ ID NO: 3987
  REGION 1..183: note = Description of Unknown: uncultivated organism with predicted taxonomy: Coraliomargarita sp. CAG:312
  REGION 1..183: note = MG2-38 HNH domain

SEQ ID NO: 3990 - protein, 183 aa, unidentified; identical to SEQ ID NO: 3988
  REGION 1..183: note = Description of Unknown: uncultivated organism with predicted taxonomy: Verrucomicrobia bacterium
  REGION 1..183: note = MG2-39 HNH domain

SEQ ID NO: 3991 - protein, 183 aa, unidentified; identical to SEQ ID NO: 3987
  REGION 1..183: note = Description of Unknown: uncultivated organism with predicted taxonomy: Coraliomargarita sp. CAG:312
  REGION 1..183: note = MG2-40 HNH domain

SEQ ID NO: 3992 - protein, 183 aa, unidentified; identical to SEQ ID NO: 3988
  REGION 1..183: note = Description of Unknown: uncultivated organism with predicted taxonomy: Coraliomargarita sp. CAG:312
  REGION 1..183: note = MG2-41 HNH domain

SEQ ID NO: 3993 - protein, 183 aa, unidentified; identical to SEQ ID NO: 3988
  REGION 1..183: note = Description of Unknown: uncultivated organism with predicted taxonomy: Coraliomargarita sp. CAG:312
  REGION 1..183: note = MG2-42 HNH domain

SEQ ID NO: 3994 - protein, 183 aa, unidentified; identical to SEQ ID NO: 3988
  REGION 1..183: note = Description of Unknown: uncultivated organism with predicted taxonomy: Verrucomicrobia
  REGION 1..183: note = MG2-43 HNH domain

SEQ ID NO: 3995 - protein, 183 aa, unidentified; identical to SEQ ID NO: 3987
  REGION 1..183: note = Description of Unknown: uncultivated organism with predicted taxonomy: Coraliomargarita sp. CAG:312
  REGION 1..183: note = MG2-44 HNH domain

SEQ ID NO: 3996 - protein, 183 aa, unidentified; identical to SEQ ID NO: 3988
  REGION 1..183: note = Description of Unknown: uncultivated organism with predicted taxonomy: Coraliomargarita sp. CAG:312
  REGION 1..183: note = MG2-45 HNH domain

SEQ ID NO: 3997 - protein, 183 aa, unidentified; identical to SEQ ID NO: 3987
  REGION 1..183: note = Description of Unknown: uncultivated organism with predicted taxonomy: Coraliomargarita sp. CAG:312
  REGION 1..183: note = MG2-46 HNH domain

SEQ ID NO: 3998 - protein, 183 aa, unidentified; identical to SEQ ID NO: 3988
  REGION 1..183: note = Description of Unknown: uncultivated organism with predicted taxonomy: Verrucomicrobia bacterium
  REGION 1..183: note = MG2-47 HNH domain

SEQ ID NO: 3999 - protein, 183 aa, unidentified
  REGION 1..183: note = Description of Unknown: uncultivated organism with predicted taxonomy: Coraliomargarita sp. CAG:312
  REGION 1..183: note = MG2-48 HNH domain
DITAFSGLDSKKKAAKLNDLVAHHKSVSAYLKKEYPEISPNGSILRKARIADDLGWVCPYTGCHFSPRQLFESGNMEREHIIPRSLRPSDSLESLVITWKEVNDMKGQCTAYEFIKECQGMKVPGRQNLSIVTPERFEAFVRRLKKPMHPAGKADIERIKIRNKLLLTEHYKKREGGFLPSDL

SEQ ID NO: 4000 - protein, 183 aa, unidentified; identical to SEQ ID NO: 3988
  REGION 1..183: note = Description of Unknown: uncultivated organism with predicted taxonomy: Coraliomargarita sp. CAG:312
  REGION 1..183: note = MG2-49 HNH domain

SEQ ID NO: 4001 - protein, 183 aa, unidentified; identical to SEQ ID NO: 3987
  REGION 1..183: note = Description of Unknown: uncultivated organism with predicted taxonomy: Coraliomargarita sp. CAG:312
  REGION 1..183: note = MG2-50 HNH domain

SEQ ID NO: 4002 - protein, 183 aa, unidentified; identical to SEQ ID NO: 3987
  REGION 1..183: note = Description of Unknown: uncultivated organism with predicted taxonomy: Coraliomargarita sp. CAG:312
  REGION 1..183: note = MG2-51 HNH domain

SEQ ID NO: 4003 - protein, 183 aa, unidentified; identical to SEQ ID NO: 3988
  REGION 1..183: note = Description of Unknown: uncultivated organism with predicted taxonomy: Verrucomicrobia bacterium
  REGION 1..183: note = MG2-52 HNH domain

SEQ ID NO: 4004 - protein, 183 aa, unidentified; identical to SEQ ID NO: 3988
  REGION 1..183: note = Description of Unknown: uncultivated organism with predicted taxonomy: Verrucomicrobia bacterium
  REGION 1..183: note = MG2-53 HNH domain

SEQ ID NO: 4005 - protein, 183 aa, unidentified
  REGION 1..183: note = Description of Unknown: uncultivated organism with predicted taxonomy: Coraliomargarita sp. CAG:312
  REGION 1..183: note = MG2-54 HNH domain
DMTAFSGLDSKKKAAKLKDLVAHHESVSKYLKNEYPNLKTNGSILRKARIADDLGWVCPYTGCHFSPRQLFESGNMEKEHIIPRSLRPSDSLESLVVTWKEVNDMKGQRTALEFIKECQGMKVPGRPNLSIVTPARFEEFVSGLRKPMHRAGKADIERIKIRNKLLLTEHYKNREGEFLPSDL

SEQ ID NO: 4006 - protein, 183 aa, unidentified; identical to SEQ ID NO: 3987
  REGION 1..183: note = Description of Unknown: uncultivated organism with predicted taxonomy: Coraliomargarita sp. CAG:312
  REGION 1..183: note = MG2-55 HNH domain

SEQ ID NO: 4007 - protein, 183 aa, unidentified; identical to SEQ ID NO: 3987
  REGION 1..183: note = Description of Unknown: uncultivated organism with predicted taxonomy: Coraliomargarita sp. CAG:312
  REGION 1..183: note = MG2-56 HNH domain

SEQ ID NO: 4008 - protein, 183 aa, unidentified; identical to SEQ ID NO: 3988
  REGION 1..183: note = Description of Unknown: uncultivated organism with predicted taxonomy: Coraliomargarita sp. CAG:312
  REGION 1..183: note = MG2-57 HNH domain

SEQ ID NO: 4009 - protein, 183 aa, unidentified; identical to SEQ ID NO: 3988
  REGION 1..183: note = Description of Unknown: uncultivated organism with predicted taxonomy: Verrucomicrobia bacterium
  REGION 1..183: note = MG2-58 HNH domain

SEQ ID NO: 4010 - protein, 183 aa, unidentified; identical to SEQ ID NO: 3987
  REGION 1..183: note = Description of Unknown: uncultivated organism with predicted taxonomy: Coraliomargarita sp. CAG:312
  REGION 1..183: note = MG2-59 HNH domain

SEQ ID NO: 4011 - protein, 183 aa, unidentified; identical to SEQ ID NO: 3987
  REGION 1..183: note = Description of Unknown: uncultivated organism with predicted taxonomy: Coraliomargarita sp. CAG:312
  REGION 1..183: note = MG2-60 HNH domain

SEQ ID NO: 4012 - protein, 183 aa, unidentified; identical to SEQ ID NO: 3987
  REGION 1..183: note = Description of Unknown: uncultivated organism with predicted taxonomy: Coraliomargarita sp. CAG:312
  REGION 1..183: note = MG2-61 HNH domain

SEQ ID NO: 4013 - protein, 185 aa, unidentified
  REGION 1..185: note = Description of Unknown: uncultivated organism with predicted taxonomy: Verrucomicrobia
  REGION 1..185: note = MG2-62 HNH domain
ELKEFSGLSAQEIATKLNEKFANFNSVAEKIEAAAQEKGVSVSASLIRKARLLEDQGFACPYTGKNISYNELFSGALEIEHIIPRSLRPSDALSSCVMTFRAVNDMKGQRTAMQFMKECAGKDVPGTNLQIQPLANFKEWVEAHRSQKLRRGFSKEDQARCKRRAELLLVERYEERNADFTERDL

SEQ ID NO: 4014 - protein, 183 aa, unidentified; identical to SEQ ID NO: 3987
  REGION 1..183: note = Description of Unknown: uncultivated organism with predicted taxonomy: Coraliomargarita sp. CAG:312
  REGION 1..183: note = MG2-63 HNH domain

SEQ ID NO: 4015 - protein, 183 aa, unidentified; identical to SEQ ID NO: 3987
  REGION 1..183: note = Description of Unknown: uncultivated organism with predicted taxonomy: Coraliomargarita sp. CAG:312
  REGION 1..183: note = MG2-64 HNH domain

SEQ ID NO: 4016 - protein, 183 aa, unidentified; identical to SEQ ID NO: 3988
  REGION 1..183: note = Description of Unknown: uncultivated organism with predicted taxonomy: Coraliomargarita sp. CAG:312
  REGION 1..183: note = MG2-65 HNH domain

SEQ ID NO: 4017 - protein, 183 aa, unidentified; identical to SEQ ID NO: 3987
  REGION 1..183: note = Description of Unknown: uncultivated organism with predicted taxonomy: Coraliomargarita sp. CAG:312
  REGION 1..183: note = MG2-66 HNH domain

SEQ ID NO: 4018 - protein, 183 aa, unidentified; identical to SEQ ID NO: 3987
  REGION 1..183: note = Description of Unknown: uncultivated organism with predicted taxonomy: Coraliomargarita sp. CAG:312
  REGION 1..183: note = MG2-67 HNH domain

SEQ ID NO: 4019 - protein, 183 aa, unidentified; identical to SEQ ID NO: 3999
  REGION 1..183: note = Description of Unknown: uncultivated organism with predicted taxonomy: Coraliomargarita sp. CAG:312
  REGION 1..183: note = MG2-68 HNH domain

SEQ ID NO: 4020 - protein, 183 aa, unidentified; identical to SEQ ID NO: 3987
  REGION 1..183: note = Description of Unknown: uncultivated organism with predicted taxonomy: Coraliomargarita sp. CAG:312
  REGION 1..183: note = MG2-69 HNH domain

SEQ ID NO: 4021 - protein, 183 aa, unidentified; identical to SEQ ID NO: 3987
  REGION 1..183: note = Description of Unknown: uncultivated organism with predicted taxonomy: Coraliomargarita sp. CAG:312
  REGION 1..183: note = MG2-70 HNH domain

SEQ ID NO: 4022 - protein, 183 aa, unidentified; identical to SEQ ID NO: 3987
  REGION 1..183: note = Description of Unknown: uncultivated organism with predicted taxonomy: Coraliomargarita sp. CAG:312
  REGION 1..183: note = MG2-71 HNH domain

SEQ ID NO: 4023 - protein, 183 aa, unidentified; identical to SEQ ID NO: 3987
  REGION 1..183: note = Description of Unknown: uncultivated organism with predicted taxonomy: Coraliomargarita sp. CAG:312
  REGION 1..183: note = MG2-72 HNH domain

SEQ ID NO: 4024 - protein, 183 aa, unidentified; identical to SEQ ID NO: 3988
  REGION 1..183: note = Description of Unknown: uncultivated organism with predicted taxonomy: Verrucomicrobia bacterium
  REGION 1..183: note = MG2-73 HNH domain

SEQ ID NO: 4025 - protein, 185 aa, unidentified; identical to SEQ ID NO: 4013
  REGION 1..185: note = Description of Unknown: uncultivated organism with predicted taxonomy: Verrucomicrobia
  REGION 1..185: note = MG2-74 HNH domain

SEQ ID NO: 4026 - protein, 183 aa, unidentified; identical to SEQ ID NO: 3987
  REGION 1..183: note = Description of Unknown: uncultivated organism with predicted taxonomy: Coraliomargarita sp. CAG:312
  REGION 1..183: note = MG2-75 HNH domain

SEQ ID NO: 4027 - protein, 193 aa, unidentified
  REGION 1..193: note = Description of Unknown: uncultivated organism with predicted taxonomy: Verrucomicrobia bacterium
  REGION 1..193: note = MG2-76 HNH domain
DLREMSGKTAKEKAQDLGLRLANFKSVVKKLEEAFEGKQIRITPGLIRKARIAEDIGWVCPYTGEHYDAFDLLHKNVDLDHIIPRADRPSNSLDSLVVTFPEVNRMKGKRTALAFMKEAETKQVEGLPRLTLKSLNHFKADIEALRPGSDPRKAKRRGAVTGPIDDDLRRWKRKELLLKVEKWDGGDFLPADL

SEQ ID NO: 4028 - protein, 193 aa, unidentified; identical to SEQ ID NO: 4027
  REGION 1..193: note = Description of Unknown: uncultivated organism
  REGION 1..193: note = MG2-77 HNH domain

SEQ ID NO: 4029 - protein, 193 aa, unidentified; identical to SEQ ID NO: 4027
  REGION 1..193: note = Description of Unknown: uncultivated organism with predicted taxonomy: Verrucomicrobia bacterium
  REGION 1..193: note = MG2-78 HNH domain

SEQ ID NO: 4030 - protein, 184 aa, unidentified
  REGION 1..184: note = Description of Unknown: uncultivated organism with predicted taxonomy: Verrucomicrobia bacterium
  REGION 1..184: note = MG2-79 HNH domain
DLREMSGKTAKEKAQDLGLRIANHHAVAEKLEKAFAEERNGKSIPITAGLIRKARIAEDLGWRCPYTGIDYEPKDLVTKRVDKDHIVPRSERASDSLDSLVITLSAINKWKGKRTAWQFVEQEQGKPVPDLPNLSIVSLTRYKQFVESLETYKGHDDDKRRKKKRKELMLLPKYEEREFVPRDL

SEQ ID NO: 4031 - protein, 193 aa, unidentified; identical to SEQ ID NO: 4027
  REGION 1..193: note = Description of Unknown: uncultivated organism with predicted taxonomy: Verrucomicrobia bacterium
  REGION 1..193: note = MG2-80 HNH domain

SEQ ID NO: 4032 - protein, 185 aa, unidentified
  REGION 1..185: note = Description of Unknown: uncultivated organism with predicted taxonomy: Verrucomicrobia bacterium
  REGION 1..185: note = MG2-81 HNH domain
DLREMSGKSAKEIQQDLGRRLANHHGVAAKLDADLDGRTFNGKPIQITAGLIRKARIAEDLGWTCPYTGKTYDAIDLVSRQVDKDHIIPRSLRPSDSLDSLVVTFAEVNKMKGQRTAWKFVSDEQGKVVEGSPQLSIVSLTRFKQWAESLETYKGHDDDKRRKKKRKELLLLPNYEEKGFVPRDL

SEQ ID NO: 4033 - protein, 193 aa, unidentified; identical to SEQ ID NO: 4027
  REGION 1..193: note = Description of Unknown: uncultivated organism with predicted taxonomy: Verrucomicrobia bacterium
  REGION 1..193: note = MG2-82 HNH domain

SEQ ID NO: 4034 - protein, 182 aa, unidentified
  REGION 1..182: note = Description of Unknown: uncultivated organism
  REGION 1..182: note = MG2-83 HNH domain
DLREMSGKTAKEKAQDLGLRIANHHNVAEKLEKAFAEEGIKQTITAGLIRKARIAEDLGWHCPYTGIQYEPKDLITRRVDKDHIVPRSERASDSLDSLVVTFSAINKWKNKRTAWQFVTDEQGKTVPDLPNLSIMSLARYKQFVESLESYKGHDDDKRRKKKRKELMLLPKYEEKEFMPRDL

SEQ ID NO: 4035 - protein, 187 aa, unidentified; identical to SEQ ID NO: 3960
  REGION 1..187: note = Description of Unknown: uncultivated organism with predicted taxonomy: Verrucomicrobia bacterium
  REGION 1..187: note = MG2-84 HNH domain

SEQ ID NO: 4036 - protein, 193 aa, unidentified; identical to SEQ ID NO: 4027
  REGION 1..193: note = Description of Unknown: uncultivated organism with predicted taxonomy: Verrucomicrobia bacterium
  REGION 1..193: note = MG2-85 HNH domain

SEQ ID NO: 4037 - protein, 187 aa, unidentified; identical to SEQ ID NO: 3960
  REGION 1..187: note = Description of Unknown: uncultivated organism
  REGION 1..187: note = MG2-86 HNH domain

SEQ ID NO: 4038 - protein, 187 aa, unidentified; identical to SEQ ID NO: 3960
  REGION 1..187: note = Description of Unknown: uncultivated organism with predicted taxonomy: Methylococcales bacterium
  REGION 1..187: note = MG2-87 HNH domain

SEQ ID NO: 4039 - protein, 187 aa, unidentified; identical to SEQ ID NO: 3960
  REGION 1..187: note = Description of Unknown: uncultivated organism
  REGION 1..187: note = MG2-88 HNH domain

SEQ ID NO: 4040 - protein, 187 aa, unidentified; identical to SEQ ID NO: 3960
  REGION 1..187: note = Description of Unknown: uncultivated organism with predicted taxonomy: Verrucomicrobia
  REGION 1..187: note = MG2-89 HNH domain

SEQ ID NO: 4041 - protein, 182 aa, unidentified; identical to SEQ ID NO: 4034
  REGION 1..182: note = Description of Unknown: uncultivated organism with predicted taxonomy: Verrucomicrobia bacterium
  REGION 1..182: note = MG2-90 HNH domain

SEQ ID NO: 4042 - protein, 182 aa, unidentified; identical to SEQ ID NO: 4034
  REGION 1..182: note = Description of Unknown: uncultivated organism
  REGION 1..182: note = MG2-91 HNH domain

SEQ ID NO: 4043 - protein, 185 aa, unidentified
  REGION 1..185: note = Description of Unknown: uncultivated organism with predicted taxonomy: Verrucomicrobiae bacterium Tous-C5FEB
  REGION 1..185: note = MG2-92 HNH domain
DLREMSGKSSKEIQQDLGRRLANHHGVAAKLEKDLDGRTFNGKPIQITAGLIRKARIAEDLSWMCPYTSKAFDAIDLVSRQVDKDHIIPRSLRPSDSLDSLVVTFAEVNKMKGQRTALQFVSDEQGKTVEGSPQLSIVSLTRFKQWAESLETYKGHDDDKRRKKKRKELLLLQTYEEKGFVPRDL

SEQ ID NO: 4044 - protein, 185 aa, unidentified
  REGION 1..185: note = Description of Unknown: uncultivated organism
  REGION 1..185: note = MG2-94 HNH domain
ELQEFSGLNAKEVAQKLNEKLGNFRAVVKGLEEAIRGSGEKVAITGSLIRKARILEDQGFICPYTGAPLGYPDLLNDRLEIEHVIPRSLRPSDALSSCVMTFRSVNDMKGQRTAMQFIGEEQGREVPGHGNLQITTKKAYEAYVAKHKKQYRYGTDDRRRCERRAELMLMERYDQRNADFTERDL

SEQ ID NO: 4045 - protein, 185 aa, unidentified; identical to SEQ ID NO: 4044
  REGION 1..185: note = Description of Unknown: uncultivated organism
  REGION 1..185: note = MG2-95 HNH domain

SEQ ID NO: 4046 - protein, 185 aa, unidentified; identical to SEQ ID NO: 3956
  REGION 1..185: note = Description of Unknown: uncultivated organism
  REGION 1..185: note = MG2-96 HNH domain

SEQ ID NO: 4047 - protein, 185 aa, unidentified
  REGION 1..185: note = Description of Unknown: uncultivated organism with predicted taxonomy: Acidobacteria bacterium RIFCSPLOWO2_12_FULL_68_19
  REGION 1..185: note = MG2-97 HNH domain
ELQEFSGLNAKEVAQKLNEKLGNFRAVVKGLEEAIRGSGEKVAITGSLIRKARILEDQGFICPYTGAPLGYPDLLNDRLEIEHVIPRSLRPSDALSSCVMTFRSVNDMKGQRTAMQFIGEEQGREVPGHGNLQITTKKAFEAYVAKHTKQYRYGTDDRRRCERRAELMLMERYDQRNADFTERDL

SEQ ID NO: 4048 - protein, 186 aa, unidentified
  REGION 1..186: note = Description of Unknown: uncultivated organism with predicted taxonomy: Verrucomicrobia bacterium
  REGION 1..186: note = MG2-98 HNH domain
DLRTMSGMTAKERETEMKKRLSNFTSAKIALEKALTGKKIGGKPIPITAGLIRKARLAMDLDMTCPYTGQIYDFIDIAKGRMQRDHVIPYAERASDSLAAQVLTFAEVNKWKDKRTAAQFVREEQGKAVKGKPNLVVLPFEKYKAFVEGLDKGKHPHPDDKARKEKRKKLLLLEEYAEKEFLPADL

SEQ ID NO: 4049 - protein, 185 aa, unidentified; identical to SEQ ID NO: 3956
  REGION 1..185: note = Description of Unknown: uncultivated organism
  REGION 1..185: note = MG2-99 HNH domain

SEQ ID NO: 4050 - protein, 187 aa, unidentified
  REGION 1..187: note = Description of Unknown: uncultivated organism with predicted taxonomy: Proteobacteria
  REGION 1..187: note = MG2-100 HNH domain
ELQEFSGLNAKEVAQKLNEKLGNFRAVVKGLEEAIRGSGEKVAITGSLIRKARILEDQGFICPYTGAPLGYPDLLNDRLEIEHVIPRSLRPSDALSSCVMTFRSVNDMKGQRTAMQFICDCEKHGRDVPGHGNLQITTKKAYEAYVAKHKKQYRYGTDDRRRCERRAELMLMERYDQRNADFTERDL

SEQ ID NO: 4051 - protein, 185 aa, unidentified; identical to SEQ ID NO: 4044
  REGION 1..185: note = Description of Unknown: uncultivated organism with predicted taxonomy: Bradyrhizobium
  REGION 1..185: note = MG2-101 HNH domain

SEQ ID NO: 4052 - protein, 184 aa, unidentified
  REGION 1..184: note = Description of Unknown: uncultivated organism with predicted taxonomy: Methylococcales bacterium
  REGION 1..184: note = MG2-102 HNH domain
DLREMSGKTAKEKAQDLGLRIANHHAVAEKLEKAFAEERNGKSIRITAGLIRKARIADDLGWKCPYTGQPYEPKHLITRFVDKDHIVPRSDRASDSLDSLVITFSAINKWKGKRTAWQFVSEEQGKPVPDLPNFSILSLARYKQFVETLETYKGHDDDKRRKKKRKELMLLPKYEEKEFVPGDL

SEQ ID NO: 4053 - protein, 182 aa, unidentified
  REGION 1..182: note = Description of Unknown: uncultivated organism with predicted taxonomy: Verrucomicrobia bacterium
  REGION 1..182: note = MG2-103 HNH domain
DLREMSGKTAKEKAQDLGLRIANHHAVSDKLEKAFAEEGKRTPITAGLIRKARIADDLGWKCPYTGQDYEPKQLVSRYVDKDHIVPRSQRASDSLDSLVITFGAINKWKGNRTAWQFVEQEQSKPVPDLPNLSILTLTRYKQFVESLETYKGHDDDKRRKKRRKDLLLLPKYEEKTFVPRDL

SEQ ID NO: 4054 - protein, 180 aa, unidentified
  REGION 1..180: note = Description of Unknown: uncultivated organism with predicted taxonomy: Verrucomicrobia bacterium
  REGION 1..180: note = MG2-104 HNH domain
ELRDLSGKTRKEQEKDLGIRLKDFKDVAKKVEDACKRRGVSITAGIIRKARVAEDLGWKCPYTGKAFEIDALLGDTMDKDHIIPHADRQSDSLDSLVMTWKEVNTWKGKRTAMQFIREEGGKTVPGRPELSIMPLEPFKKHVASLDTRKGHNDDKARKKRRVQRLLTENYEEKEFTPRDL

SEQ ID NO: 4055 - protein, 180 aa, unidentified; identical to SEQ ID NO: 4054
  REGION 1..180: note = Description of Unknown: uncultivated organism with predicted taxonomy: Verrucomicrobia bacterium
  REGION 1..180: note = MG2-105 HNH domain

SEQ ID NO: 4056 - protein, 155 aa, unidentified
  REGION 1..155: note = Description of Unknown: uncultivated organism with predicted taxonomy: Rothia
  REGION 1..155: note = MG3-6 HNH domain
TGLMGPTQRQKILNEQKKNRADNERIRDELRESGVDNPSRAEVRRHLIVQEQECQCLYCGTMITTTTSELDHIVPRAGGGSSRRENLAAVCRACNAKKKRELFYAWAGPVKSQETIERVRQLKAFKDSKKAKMFKNQIRRLNQTEADEPIDERSL

SEQ ID NO: 4057 - protein, 159 aa, unidentified
  REGION 1..159: note = Description of Unknown: uncultivated organism with predicted taxonomy: Rothia
  REGION 1..159: note = MG3-7 HNH domain
TGLMGPAQRADVLNEIAKNRKKNDKIREDLRAGGINNPTRADIRRNAIVQDQESQCLYCGATIGVSYSELDHIVPRAGGGSSRRENLAAVCRACNDSKKDTPFAVWAKNTSRPVTLEGTIQRLRELKAFKRPKDRRMVDLIIRRLKQTEKDDPIDERSL

SEQ ID NO: 4058 - protein, 155 aa, unidentified
  REGION 1..155: note = Description of Unknown: uncultivated organism with predicted taxonomy: Rothia
  REGION 1..155: note = MG3-8 HNH domain
IGLVGPAQRQNILKEQEDNRKNNECIRDELRKSGVENPSRTEVRRHLVVQDQESQCLYCGAVIRTDTSELDHIVPRAGGGSSRRENLAAVCRYCNSKKDRTLFYDWAGSVRLQETIDRVRQLKAFKDSKKAKMFKNQIRRLRQTEADEPIDERSL

SEQ ID NO: 4059 - protein, 156 aa, unidentified
  REGION 1..156: note = Description of Unknown: uncultivated organism with predicted taxonomy: Dermabacter hominis
  REGION 1..156: note = MG3-1 HNH domain
TGLMGAEQRSSIIAENNRNRRDSDRIRAELQADGLSEPSRLDVRRHRQVQRQNCTCLYCGTPITTTTSELDHIVPRRGGGSSQGSNLVAVCRECNASKAHRIFAEWAEDSQREGVSVKEAAKRVRHWLNASASMKREVTRRLQQKRTDPPIDERDL

SEQ ID NO: 4060 - protein, 163 aa, unidentified
  REGION 1..163: note = Description of Unknown: uncultivated organism with predicted taxonomy: Micrococcales
  REGION 1..163: note = MG3-5 HNH domain
TGLMGPAQRAEVLREMASGRRKNDRIRQELRTSGIDEPNLSDVKRHRKIQMQGGVCLYCGTDITSATAELDHIVPRAGGGNSTSTNLVAVCRVCNAAKGRRTFPEFASSDTRDAVSLEAAVERVKLWIDDKGIKNIGESRYARDVIRRLKQSTQDEPIDERSL

SEQ ID NO: 4061 - protein, 155 aa, unidentified
  REGION 1..155: note = Description of Unknown: uncultivated organism with predicted taxonomy: Rothia
  REGION 1..155: note = MG3-6 HNH domain
TGLMGPSQRADVLKEIARNRNANERIRQELREGGIEAPNRADIRRNSIIQDQESQCLYCGKEIGVLTAELDHIVPRAGGGSSKRENLAAVCRACNASKGSRPFAVWAGPARLERTIQRLRELQAFKTKSKKRTLNAIIRRLKQREEDEPIDERSL

SEQ ID NO: 4062 - protein, 155 aa, unidentified
  REGION 1..155: note = Description of Unknown: uncultivated organism with predicted taxonomy: Rothia
  REGION 1..155: note = MG3-7 HNH domain
TGLVGPAQRQEILNEQKKNRENNELIRGDLRKSGVENPSRAEVRRHLIVQEQESQCLYCGAVIRTDTSELDHIVPRAGGGSSRRENMAAVCHYCNSKKKRTLFYDWAGPVKLQETVDRVRQLEAFKDSKKAKMFKNQIRRLKQTEADVPIDERSL

SEQ ID NO: 4063 - protein, 155 aa, unidentified; identical to SEQ ID NO: 4058
  REGION 1..155: note = Description of Unknown: uncultivated organism with predicted taxonomy: Rothia
  REGION 1..155: note = MG3-8 HNH domain

SEQ ID NO: 4064 - protein, 162 aa, unidentified
  REGION 1..162: note = Description of Unknown: uncultivated organism with predicted taxonomy: Brevibacterium
  REGION 1..162: note = MG3-42 HNH domain
SSLLGPAARAEYQREVNANRRARERSLESLREQGVADPTVATVRRFSAVQHQNGVCLYCGSAITAKPGDSGCELDHVVPRSGGGSSKRENLVAACRRCNSEKGNLPFSLWAAESTRPEVSVEAALTRLQNFNWERRDRAVKKGLIRRLKQTSEDEPIDERSL

SEQ ID NO: 4065 - protein, 162 aa, unidentified
  REGION 1..162: note = Description of Unknown: uncultivated organism with predicted taxonomy: Brevibacterium mcbrellneri
  REGION 1..162: note = MG3-68 HNH domain
SSLLGPAARAEYQREVNANRRARERSIESLREQGVADPTVATVRRFSAVQHQNGVCLYCGSTITAKPGDSGCELDHVVPRSGGGSSKRENLVAACRRCNSEKGNLPFSIWAATCTRPEVSVEAALVRLENFNWEKRDRAVKKGLIRRLKQTSEDEPIDERSL

SEQ ID NO: 4066 - protein, 162 aa, unidentified; identical to SEQ ID NO: 4064
  REGION 1..162: note = Description of Unknown: uncultivated organism with predicted taxonomy: Brevibacterium mcbrellneri
  REGION 1..162: note = MG3-88 HNH domain

SEQ ID NO: 4067 - protein, 158 aa, unidentified
  REGION 1..158: note = Description of Unknown: uncultivated organism with predicted taxonomy: Planctomycetes
  REGION 1..158: note = MG4-5 HNH domain
DMKRGRKQRKETWQAMRENERCRLDARKLLQDHGIQEPRPADILKVLLAEECNWECPYTGKAISMDALIGSQPQFDVEHIIPFSRSLDNSFLNKTLCYHEENRNVKQNRTPFEAYGGDEQRWHEILQRVRRFRGSAAESKLRKFQLRQLPADFTNRHL

SEQ ID NO: 4068 - protein, 159 aa, unidentified
  REGION 1..159: note = Description of Unknown: uncultivated organism
  REGION 1..159: note = MG4-11 HNH domain
DLKHNVKTKSKIIAQIKSREEEREAARKGLADLGIDNPTPANIKKWVIAERCNWTCVYTGKRADKRVEFGPHPQFDIDHIQPYSRSGNDSLGNKVLCFSAENRHVKKNQTPLECYGDDEERWNEIMGRVSAITGPDRVKTYRYFITTAEENEGFTARSL

SEQ ID NO: 4069 - protein, 161 aa, unidentified
  REGION 1..161: note = Description of Unknown: uncultivated organism
  REGION 1..161: note = MG4-12 HNH domain
DLKRSRKQRDEIFRKNQARKKERENIEKTLQNEFYIKSPKGRDVLKYRLWKECGGICPYTGMVISPDDLFGPNSRFDIEHIIPFSRSMDDSFANKTLCYAEENRNVKKNQTPIECYGDSPKFREILERVRKTFTGEFKFRKLKLFETQEPESITEFSKACL

SEQ ID NO: 4070 - protein, 158 aa, unidentified
  REGION 1..158: note = Description of Unknown: uncultivated organism
  REGION 1..158: note = MG4-13 HNH domain
EMKKTRQQREEIWKKNKQNEEKRKQAAQAIIKEAGENPKPADIEKYLLWDECNGICPYTGKSISLKQLFSGEVDVEHIIPYSICLDNSYFNKTLCFHDENAKVKNNKTPWQAYGSDEKKWNEILERVKRFKGDAAKEKLKKFQIKDLEELDDFISSQL

SEQ ID NO: 4071 - protein, 160 aa, unidentified
  REGION 1..160: note = Description of Unknown: uncultivated organism
  REGION 1..160: note = MG4-14 HNH domain
DLKKSKEDRKKISDQIARNRRDRERAKKALIDNGIQEPSRDDIEKWLLYEECNGICPYTGKSISLASLFGPNPQFDVEHIIPFSRCLDNSFTNKTLCDIEENRNRKRNQTPYEAYGADPARWEEIIQRVKRFRGKAAAAKLHRFQLESVDSLEEFASKQL

SEQ ID NO: 4072 - protein, 158 aa, unidentified
  REGION 1..158: note = Description of Unknown: uncultivated organism with predicted taxonomy: Thermogutta terrifontis
  REGION 1..158: note = MG4-15 HNH domain
ELKRSRKEREEISKRMREQQKRREEAAQRVLQELGRTAAPRDIEKYLLAEECNWICPYTGKQITTQALLGDHPEFDVEHIWPLHRSLDDSFMNKTLCYHQENRSVKAGRTPYEAYATDPVRWQEIITRVRNFRGPFARQKLVRFQAEEIPPDFALRQL

SEQ ID NO: 4073 - protein, 158 aa, unidentified; identical to SEQ ID NO: 4072
  REGION 1..158: note = Description of Unknown: uncultivated organism with predicted taxonomy: Thermogutta terrifontis
  REGION 1..158: note = MG4-16 HNH domain

SEQ ID NO: 4074 - protein, 158 aa, unidentified
  REGION 1..158: note = Description of Unknown: uncultivated organism with predicted taxonomy: Thermogutta terrifontis
  REGION 1..158: note = MG4-17 HNH domain
ELKRSRKERAEISKRMREQQKRREEAAQKVLEELGRTATPRDIEKYLLAQECNWQCPYTGRQITVQSLLGDDPQFDVEHIWPLHRSLDDSFMNKTLCYHHENRSVKAGRTPYEAYATDPLRWQEILSRVRSFRGPFARQKLDRFQAVEIPPDFAMRQL

SEQ ID NO: 4075 - protein, 158 aa, unidentified
  REGION 1..158: note = Description of Unknown: uncultivated organism with predicted taxonomy: Thermogutta terrifontis
  REGION 1..158: note = MG4-18 HNH domain
ELKRSRKEREEISKRMREQQKRREEAAQRVLQELGRTAAPRDIEKYLLAEECNWICPYTGKQITTQALLGDHPEFDVEHIWPLHRSLDDSFMNKTLCYHQENRSVKAGRTPYEAYATDPVRWQEIITRVRNFRGPFARQKLDRFQAEEIPPDFALRQL

SEQ ID NO: 4076 - protein, 160 aa, unidentified
  REGION 1..160: note = Description of Unknown: uncultivated organism
  REGION 1..160: note = MG4-19 HNH domain
DLKKPRHERAKAVSQNRDREKQRSAAKVKMLQEIGPGFEHPSRADVEKALLWEECQGECPYTGKRFPLSSLFGENPPLQVEHIIPFSRIPDDSFQNKTLCYHEENQIKGNRTPFEAYKDAEQFETILNRVRNWRTPNPGKQRRFELRTLEELEGFSSRQL

SEQ ID NO: 4077 - protein, 160 aa, unidentified; identical to SEQ ID NO: 4076
  REGION 1..160: note = Description of Unknown: uncultivated organism
  REGION 1..160: note = MG4-20 HNH domain

SEQ ID NO: 4078 - protein, 160 aa, unidentified; identical to SEQ ID NO: 4076
  REGION 1..160: note = Description of Unknown: uncultivated organism
  REGION 1..160: note = MG4-21 HNH domain

SEQ ID NO: 4079 - protein, 160 aa, unidentified; identical to SEQ ID NO: 4076
  REGION 1..160: note = Description of Unknown: uncultivated organism with predicted taxonomy: Planctomyces sp. SH-PL14
  REGION 1..160: note = MG4-22 HNH domain

SEQ ID NO: 4080 - protein, 160 aa, unidentified
  REGION 1..160: note = Description of Unknown: uncultivated organism
  REGION 1..160: note = MG4-23 HNH domain
DKKNPRHERAKAVSQNRDREKQRSAAKVKMLQEIGPGFEHPSRADVEKALLWEECQGECPYTGKRFPLSSLFGENPPLQVEHIIPFSRIPDDSFQNKTLCYHEENQIKGNRTPFEAYKDAEQFETILNRVRNWRTPNPGKQRRFELRTLEELEGFSSRQL

SEQ ID NO: 4081 - protein, 160 aa, unidentified; identical to SEQ ID NO: 4076
  REGION 1..160: note = Description of Unknown: uncultivated organism
  REGION 1..160: note = MG4-24 HNH domain

SEQ ID NO: 4082 - protein, 160 aa, unidentified; identical to SEQ ID NO: 4076
  REGION 1..160: note = Description of Unknown: uncultivated organism
  REGION 1..160: note = MG4-25 HNH domain

SEQ ID NO: 4083 - protein, 160 aa, unidentified; identical to SEQ ID NO: 4076
  REGION 1..160: note = Description of Unknown: uncultivated organism
  REGION 1..160: note = MG4-26 HNH domain

SEQ ID NO: 4084 - protein, 160 aa, unidentified; identical to SEQ ID NO: 4076
  REGION 1..160: note = Description of Unknown: uncultivated organism
  REGION 1..160: note = MG4-27 HNH domain

SEQ ID NO: 4085 - protein, 160 aa, unidentified; identical to SEQ ID NO: 4076
  REGION 1..160: note = Description of Unknown: uncultivated organism
  REGION 1..160: note = MG4-28 HNH domain

SEQ ID NO: 4086 - protein, 160 aa, unidentified; identical to SEQ ID NO: 4076
  REGION 1..160: note = Description of Unknown: uncultivated organism
  REGION 1..160: note = MG4-29 HNH domain

SEQ ID NO: 4087 - protein, 165 aa, unidentified
  REGION 1..165: note = Description of Unknown: uncultivated organism with predicted taxonomy: Alphaproteobacteria bacterium
  REGION 1..165: note = MG4-30 HNH domain
ELKKSKKQREAESKRNRENEAVRVKAKQTIKEITGDEHPSTDDVRRVQLFNDCRGTCVYCGETIAARNFLGRESQVDIDHIIPFSRSMDNSYANLVICHARCNRNKGDRTPFEAFSVDPESYGQIRDRVKIFAGDGRTVSEKIKRFEMDEGELEKFLGDFRNRQL

SEQ ID NO: 4088 - protein, 157 aa, unidentified
  REGION 1..157: note = Description of Unknown: uncultivated organism
  REGION 1..157: note = MG4-31 HNH domain
DLKNSRKKRADISKQNMERRGQREKAAELLAKQFGIEQPSHHDREKVLLHWECGGFCPYTGKPIELNDLFGPNPSFQVEHIWPLSASMDDSFMNKTLCHVDENARKGGRSPVDCYDQKTLDLIKERIGRFNCDWKVREAKRRRFTEPIPEDFHQRHL

SEQ ID NO: 4089 - protein, 158 aa, unidentified
  REGION 1..158: note = Description of Unknown: uncultivated organism
  REGION 1..158: note = MG4-32 HNH domain
DLKSGRGRRERIANRMRDREKEREAAASAIAREIGVADPPRWMIEKHLLAEECGWRCPYTGKGFGIHDLLGRNSQFDLEHIWPFSRSLDNSYANKTICYHEENRNRKQGRTPAEAYSEEELQAILERVRAFKGDPFLIQAKLRRFTDPIEEGFTERHL

SEQ ID NO: 4090 - protein, 157 aa, unidentified; identical to SEQ ID NO: 4088
  REGION 1..157: note = Description of Unknown: uncultivated organism with predicted taxonomy: Insolitispirillum peregrinum
  REGION 1..157: note = MG4-33 HNH domain

SEQ ID NO: 4091 - protein, 161 aa, unidentified
  REGION 1..161: note = Description of Unknown: uncultivated organism with predicted taxonomy: Planctomycetes bacterium
  REGION 1..161: note = MG4-34 HNH domain
DLKRGRKEREKQSKRMAARRKQREEAKRRLLKETGIADPRRSDIERVLLADECNWICPFTGVKFGWSDLFGPTPRFDVEHIWPYSRSLDDSFLNKTICDQRENRTRKRNQTPHEAYGATPEVYERILQRVRAFSGDPWVLAAKLSRFEAESIPEGHVDRHL

SEQ ID NO: 4092 - protein, 158 aa, unidentified; identical to SEQ ID NO: 4089
  REGION 1..158: note = Description of Unknown: uncultivated organism
  REGION 1..158: note = MG4-35 HNH domain

SEQ ID NO: 4093 - protein, 166 aa, unidentified
  REGION 1..166: note = Description of Unknown: uncultivated organism with predicted taxonomy: Proteobacteria
  REGION 1..166: note = MG4-36 HNH domain
ELRKSREERMNESKRMRGREKEREEILRRIRDEVGIPEEKISRDDVLKGLLWQECDGKCPYCGESLGGFASLYGGNSPAQIEHIIPFSRSLDNSFVNLTLAHVSDNNYKGDRTPWEAYGSNPERWDQILQRVSVFRGSYSKAKLNRFKMDENAVRELSEQFSSRAL

SEQ ID NO: 4094 - protein, 166 aa, unidentified
  REGION 1..166: note = Description of Unknown: uncultivated organism with predicted taxonomy: Solemya velesiana gill symbiont
  REGION 1..166: note = MG4-37 HNH domain
ELRKSREERMKESRRMRDREKEREEIIRRIRDEVGIPEEKISRDDVLKGLLWQECEGRCPYCGESLGGFASLFGGNSPAQIEHIIPFSRSLDNSFVNLTLAHVSDNAYKGDRTPREAYGSDPERWNEILQRVEVFKGSYSKAKLNRFKMDESAVGELFEQFSSRAL

SEQ ID NO: 4095 - protein, 166 aa, unidentified
  REGION 1..166: note = Description of Unknown: uncultivated organism with predicted taxonomy: Acidobacteria
  REGION 1..166: note = MG4-38 HNH domain
ELRKSREERQKESRRMREREAERERMRQKIHKEVGIPLEQIREEDVRKGLLYEECCRTCPYTGKPLGGFAGLFSGTSPVQIEHIIPYSISLDDSFANLTLCLASENAVKHNRTPYQAYSADPGRWEDIQARVRAFRGPYAAEKLRRFLMDEQAAAALLQRFSARHL

SEQ ID NO: 4096 - protein, 159 aa, unidentified
  REGION 1..159: note = Description of Unknown: uncultivated organism with predicted taxonomy: Planctomycetes
  REGION 1..159: note = MG4-39 HNH domain
DLKKSRHERQQLSKGMRQQQKQREDARNWLQHEMGISNPTAHDILKYRLWIECEKLCPYTGKPISKEALFGSEPQFDVEHIIPYSRCLDNSFANKTLCEVAENRAAKKNRTPYEAYGNAPQRWHEILQRVSRFRGDAAKAKLRRFQLTEIPADFANRHL

SEQ ID NO: 4097 - protein, 159 aa, unidentified
  REGION 1..159: note = Description of Unknown: uncultivated organism with predicted taxonomy: Thermogutta terrifontis
  REGION 1..159: note = MG4-40 HNH domain
DIKRSRREREALSRRMRKQEDSRKKAAQIAREHLGREPSPFEITKVLLAEECNWKCPYTGREKIELAALLGPEPQFDVEHIWPFDRSLDDSFANKTLCYHEENRLRKSNRTPWEAYGSDPHRWGEIIARVKQFKGEWAKEKLRRFLAQELPEDFPQRHL

SEQ ID NO: 4098 - protein, 159 aa, unidentified
  REGION 1..159: note = Description of Unknown: uncultivated organism with predicted taxonomy: Planctomycetes
  REGION 1..159: note = MG4-41 HNH domain
DLKKSRHERQQLSKGMRQQQKQREDARNWLQHEMGISNPTAHDILKYRLWIECEKLCPYTGKPISKEALFGSEPQFDMEHIIPHSRCLDDSFANKTLCELAENRAAKKNRTPYEAYGHDPQRWHEILQRVSRFQGDAAKAKLRRFQLTEIPADFANRHL

SEQ ID NO: 4099 - protein, 159 aa, unidentified; identical to SEQ ID NO: 4097
  REGION 1..159: note = Description of Unknown: uncultivated organism with predicted taxonomy: Thermogutta terrifontis
  REGION 1..159: note = MG4-42 HNH domain

SEQ ID NO: 4100 - protein, 159 aa, unidentified; identical to SEQ ID NO: 4097
  REGION 1..159: note = Description of Unknown: uncultivated organism
  REGION 1..159: note = MG4-43 HNH domain

SEQ ID NO: 4101 - protein, 170 aa, unidentified
  REGION 1..170: note = Description of Unknown: uncultivated organism with predicted taxonomy: Proteobacteria
  REGION 1..170: note = MG4-44 HNH domain
EMKQSRIQRQKRYQTMRDREKMRNQARQSLQAELGWDPNDIKGRDIEKWLLAEECSWVCPYSGKPINYHNLFGEKAEFDIEHIIPYSKSLDDSFVNKTLCHREWNQKKGNRTPAQAFKNTPEWEAMLQRVRAFKPLHAVHMKKGESSKRNPKYDLFCMEEIPPDYVDNKL

SEQ ID NO: 4102 - protein, 170 aa, unidentified; identical to SEQ ID NO: 4101
  REGION 1..170: note = Description of Unknown: uncultivated organism
  REGION 1..170: note = MG4-45 HNH domain

SEQ ID NO: 4103 - protein, 159 aa, unidentified; identical to SEQ ID NO: 4097
  REGION 1..159: note = Description of Unknown: uncultivated organism
  REGION 1..159: note = MG4-46 HNH domain

SEQ ID NO: 4104 - protein, 166 aa, unidentified
  REGION 1..166: note = Description of Unknown: uncultivated organism with predicted taxonomy: Proteobacteria
  REGION 1..166: note = MG4-47 HNH domain
ELRKSREERMKESRRMRDREKEREEIIRRIRDEVGIPEEKISRDDVLKGLLWQECEGRCPYCGESLGGFASLFGGNSPAQIEHIIPFSRSLDNSFVNLTLAHVSDNAYKGDRTPREAYGSDPERWDEILQRVEVFKGSYSKAKLNRFKMDESAVGELFEQFSSRAL

SEQ ID NO: 4105 - protein, 160 aa, unidentified
  REGION 1..160: note = Description of Unknown: uncultivated organism
  REGION 1..160: note = MG4-48 HNH domain
DLRRPLCEVREMIKQMRKREKMRREAERKLCEEHGIRKPTAREIEKYLLWKECNARCPYTNQDIRAEALFGSHPRFDVEHIIPWSRCLDDSFANKTLCEAKHNREQKRNRMPTEAYSREALEQIWERVRRFQGDYAAEKLRRFQMDPPPELHLIHRGDQL

SEQ ID NO: 4106 - protein, 159 aa, unidentified; identical to SEQ ID NO: 4098
  REGION 1..159: note = Description of Unknown: uncultivated organism
  REGION 1..159: note = MG4-49 HNH domain

SEQ ID NO: 4107 - protein, 166 aa, unidentified
  REGION 1..166: note = Description of Unknown: uncultivated organism with predicted taxonomy: Solemya velesiana gill symbiont
  REGION 1..166: note = MG4-51 HNH domain
ELRKSREEREKDSKRMREHEKEREAIIRRICEEIGIPETGISRDDVRKAMLWEECNGMCPYSGRSLGGFASLFSGNSPAQIEHIIPFSRSLDNSFVNLTLAHVSENAYKGDKTPWEAYGSNPEQWDRILQRVALFKGSYKKAKLNRFKMDSNAVGEFLEQFSSRAL

SEQ ID NO: 4108 - protein, 166 aa, unidentified
  REGION 1..166: note = Description of Unknown: uncultivated organism
  REGION 1..166: note = MG4-52 HNH domain
ELRKSREERMKESRRMRDREKEREEIIRRIRDEVGIPEEKISRDDVLKGLLWQECEGRCPYCGESLGGFASLFGGNSPAQIEHIIPFSRSLDNSFVNLTLAHVSDNAYKGDRTPREAYGSDPERWDEILQWVEVFKGSYSKAKLNRFKMDESAVGELFEQFSSRAL

SEQ ID NO: 4109 - protein, 161 aa, unidentified
  REGION 1..161: note = Description of Unknown: uncultivated organism
  REGION 1..161: note = MG4-53 HNH domain
EVKKNARQRHQIALRNRENERLRRAAAERIVREVGIANPSRADIEKVLLAEECNWHCPYTGKPISMAALFGEHPQFDVEHIIPFARSLDDSFMNKTLCDAEENRRVKRGRTPFEAYGSQPERWAEILRRVRAFKGSAADAKLERFRCESPPDATELCSRLL

SEQ ID NO: 4110 - protein, 166 aa, unidentified; identical to SEQ ID NO: 4095
  REGION 1..166: note = Description of Unknown: uncultivated organism
  REGION 1..166: note = MG4-54 HNH domain

SEQ ID NO: 4111 - protein, 170 aa, unidentified
  REGION 1..170: note = Description of Unknown: uncultivated organism with predicted taxonomy: Flavobacterium hercynium
  REGION 1..170: note = MG4-55 HNH domain
EMKQSRIQRQKRYQTMRDREKMRNQARQSLQAELGWDPNDIKGRDIEKWLLAEECGWVCPYSGKPINYHNLFGEKAEFDIEHIIPYSKSLDDSFVNKTLCHREWNQKKGNRTPAQAFKNTPEWETMLQRVRAFKPLHAVHMKKGESSKHNPKYDLFCMEEIPPDYVDNKL

SEQ ID NO: 4112 - protein, 166 aa, unidentified; identical to SEQ ID NO: 4093
  REGION 1..166: note = Description of Unknown: uncultivated organism with predicted taxonomy: Pseudoxanthobacter soli
  REGION 1..166: note = MG4-56 HNH domain

SEQ ID NO: 4113 - protein, 161 aa, unidentified
  REGION 1..161: note = Description of Unknown: uncultivated organism with predicted taxonomy: candidate division Zixibacteria bacterium CG_4_9_14_3_um_filter_46_8
  REGION 1..161: note = MG4-57 HNH domain
DLKRSKKQRQTLTERIRSREKLREDARKRLENEKLVERPTRNDIDKVLLADECNWICPYTGRQIGWKTLFGPSPQFDIEHIIPFSRCLDDSLANKTLCDIEENRNVKRNRTPWEAYGSNPEKWGQILDRVRRFKGDDAILKLQRFQLKDVGDFEEFSSRQL

SEQ ID NO: 4114 - protein, 166 aa, unidentified
  REGION 1..166: note = Description of Unknown: uncultivated organism
  REGION 1..166: note = MG4-58 HNH domain
ELRKSREERMKESRRMRDREKEREEIIRRIRDEVGIPEEKISRDDVLKGLLWQECEGRCPYCGESLGGFASLFGGNPPAQIEHIIPFSRSLDNSFVNLTLAHVSDNAYKGDRTPREAYGSDPERWNEILQRVEVFKGSYSKAKLNRFKMDESAVGELFEQFSSRAL

SEQ ID NO: 4115 - protein, 166 aa, unidentified; identical to SEQ ID NO: 4104
  REGION 1..166: note = Description of Unknown: uncultivated organism with predicted taxonomy: Proteobacteria
  REGION 1..166: note = MG4-60 HNH domain

SEQ ID NO: 4116 - protein, 159 aa, unidentified; identical to SEQ ID NO: 4097
  REGION 1..159: note = Description of Unknown: uncultivated organism with predicted taxonomy: Thermogutta terrifontis
  REGION 1..159: note = MG4-61 HNH domain

SEQ ID NO: 4117 - protein, 162 aa, unidentified
  REGION 1..162: note = Description of Unknown: uncultivated organism
  REGION 1..162: note = MG4-62 HNH domain
DLKQSRKKRKTASDRMRTREKEREKAAQRIITQPGLGIQHPKRWQIEKVLLAEECNWRCPFTDRGFCMADLLGSTPQVDVEHIWPYSRSMDDSFLNKTLCYHEENRNRKRGHTPMEAYGPTPEQYEAILDRVRRFKGDHFAVREKLRRFTDALDEDFPLRHL

SEQ ID NO: 4118 - protein, 157 aa, unidentified
  REGION 1..157: note = Description of Unknown: uncultivated organism with predicted taxonomy: Planctomyces sp. SH-PL14
  REGION 1..157: note = MG4-63 HNH domain
DLKNSRSRRADLTTRRNRNQARRERAKEAIEKECNNSRPSRFDIEKWLLAEECGFQCPYTGQSIPRHRVLSAEFEVEHIVPFSRSLDNSFTNKTLSHRDANAKKGNRTPMEAFGQPEEKWEQILARVKRFDGPFARRKLDLFQQRTPPEADFYERQL

SEQ ID NO: 4119 - protein, 162 aa, unidentified; identical to SEQ ID NO: 4117
  REGION 1..162: note = Description of Unknown: uncultivated organism
  REGION 1..162: note = MG4-64 HNH domain

SEQ ID NO: 4120 - protein, 159 aa, unidentified
  REGION 1..159: note = Description of Unknown: uncultivated organism
  REGION 1..159: note = MG4-65 HNH domain
DLKRPRKQREEISKRNRGRQKDREEAAEAIRSALPGLEPRRADIEKWLLAEECNWRCPYTGRSINAAALLGSTPQFDVEHIWPMSRSLDNTFANKTLCYHEENRARKGNRTPLEAYGSDPQRWEEILQSVRRFNGPLAWEKLRRFMAREIPQDFTDRQL

SEQ ID NO: 4121 - protein, 159 aa, unidentified
  REGION 1..159: note = Description of Unknown: uncultivated organism
  REGION 1..159: note = MG4-66 HNH domain
DLKKSRYERQQLFKGMRQQQKQREEAKSWLQCQMGITNPTAHDILKYRLWIECNQQCPYTGKPISKEALFGREPQFDVEHIIPFSRCLDNSFTNKTLCEIAENRNVKKNRTPYEAYGHDPQRWHEILQRVSRFQGDAAKAKLRRFQLTEIPADFANRHL

SEQ ID NO: 4122 - protein, 159 aa, unidentified
  REGION 1..159: note = Description of Unknown: uncultivated organism with predicted taxonomy: Proteobacteria
  REGION 1..159: note = MG4-67 HNH domain
DLKRSRKDRQELSKVIRENEKLREKAKERILRELGDQQPTRADIEKVLLAEECGWECPYTGKRFGMQELLGQNPQFDVEHIIPLSRSLDNSFGNKTLCYHEENRNHKRNRTPWEAYHADEQRWHQILERVRRFQGASARGKMRRFLMEAIPDDFTSRQL

SEQ ID NO: 4123 - protein, 158 aa, unidentified
  REGION 1..158: note = Description of Unknown: uncultivated organism with predicted taxonomy: Thermogutta terrifontis
  REGION 1..158: note = MG4-68 HNH domain
ELKLGKKRRQELAKEMRKREAERERAAKVIEETLHRKARPNEILKYLLADECDWECPYTGKKISVLTLLGDQPQFDVEHIWPFDRTLDDSFGNKTLCYHEENRQVKGNKTPFEAYSDSPDRWREILERVKRFKGPFAKEKLRRFLAADIPQDFPMRHL

SEQ ID NO: 4124 - protein, 166 aa, unidentified
  REGION 1..166: note = Description of Unknown: uncultivated organism with predicted taxonomy: Planctomycetes bacterium
  REGION 1..166: note = MG4-70 HNH domain
ELRKSREEREKDSKRMREHEKEREAIIRRICEEIGIPETRISRDDVRKAMLWEECNGMCPYSGRSLGGFASLFSGNSPAQIEHIIPFSRSLDNSFVNLTLAHVSENAYKGDKTPWEAYGANPEQWDRILQRVALFKGSYKKAKLNRFKMDSNAVGEFLEQFSSRAL

SEQ ID NO: 4125 - protein, 165 aa, unidentified
  REGION 1..165: note = Description of Unknown: uncultivated organism
  REGION 1..165: note = MG4-71 HNH domain
DLKKPRKEREKAWKGNREREKERKAAADRLLKEAGITNPSPADIEKVLLMEECGGICPYTGRPITIPALFGDSPQFDVEHIIPFSVSLDDSFVNKTLCWHEENRHHKRNKTPYEAYSGNRERYEEILRRVSRFSGRFRKEKLRRFQMTLADVKAEYGDDFTARHL

SEQ ID NO: 4126 - protein, 167 aa, unidentified
  REGION 1..167: note = Description of Unknown: uncultivated organism with predicted taxonomy: Acidobacteria
  REGION 1..167: note = MG4-72 HNH domain
DLKKSKKQRQAISENNRRNESARAKAAEAIIKADVGISAPSPDDIRKVLLAEECHWTCPYTGRSISMRSLLGPEPQFDIEHIVPFSRSMDNSFQNLTLCYVPENRSVKGNRTPWQAYHGDPERYQAILDRVRKFAGDRQTVAAKLRRFTMTDDELEGFLEDFRNRQL

SEQ ID NO: 4127 - protein, 165 aa, unidentified; identical to SEQ ID NO: 4125
  REGION 1..165: note = Description of Unknown: uncultivated organism
  REGION 1..165: note = MG4-73 HNH domain

SEQ ID NO: 4128 - protein, 167 aa, unidentified; identical to SEQ ID NO: 4126
  REGION 1..167: note = Description of Unknown: uncultivated organism with predicted taxonomy: Acidobacteria
  REGION 1..167: note = MG4-74 HNH domain

SEQ ID NO: 4129 - protein, 166 aa, unidentified; identical to SEQ ID NO: 4124
  REGION 1..166: note = Description of Unknown: uncultivated organism with predicted taxonomy: Proteobacteria
  REGION 1..166: note = MG4-76 HNH domain

SEQ ID NO: 4130 - protein, 166 aa, unidentified
  REGION 1..166: note = Description of Unknown: uncultivated organism
  REGION 1..166: note = MG4-77 HNH domain
ELRKSREERAEDSKRMRGREREREAVRDQIHKEIGIPLDQISREDVLKGLLYRECEGMCPYCGQSLGGFASLFGGNSPVQIEHIIPFSRSLDNSFVNLTLAHVSDNAEKGNRTPWEAYGHDPGKWEQILQRVGAFKGSYAKAKLNRFKMDEQAVADLLQQFSSRHL

SEQ ID NO: 4131 - protein, 162 aa, unidentified
  REGION 1..162: note = Description of Unknown: uncultivated organism
  REGION 1..162: note = MG4-78 HNH domain
ELRKPLRRLRELLRRNEERQRQRKHAIKYLIEKGIQDPRPDQIEKFLLWVECKQICPYTGQSISDVDLFGPLPRFDVEHIIPWSRCLDDSFANKTLCEVDHNRNRKRNRMPTEVYSQDELSQILRRVRAFQGPYRFEKLRRFQMTEADLTTETGWLLRGDQL

SEQ ID NO: 4132 - protein, 162 aa, unidentified; identical to SEQ ID NO: 4131
  REGION 1..162: note = Description of Unknown: uncultivated organism
  REGION 1..162: note = MG4-79 HNH domain

SEQ ID NO: 4133 - protein, 161 aa, unidentified
  REGION 1..161: note = Description of Unknown: uncultivated organism with predicted taxonomy: Planctomycetes
  REGION 1..161: note = MG4-80 HNH domain
DLRRSRKEREKISAEQAKREKARRDALQKMLREFPNYQPKRGYDPAIEKILLAEECDWECPFTGKKINMQTLLGKSPQFDVAHIYPRRYLDDSFANKTLCYHEENRHRMLDRLPMEAYAGNPQRWQEILARVKRFQGPYAAEKLRRFQTEKVPDDFVSRQL

SEQ ID NO: 4134 - protein, 166 aa, unidentified; identical to SEQ ID NO: 4130
  REGION 1..166: note = Description of Unknown: uncultivated organism with predicted taxonomy: Rhodobacteraceae
  REGION 1..166: note = MG4-81 HNH domain

SEQ ID NO: 4135 - protein, 158 aa, unidentified
  REGION 1..158: note = Description of Unknown: uncultivated organism
  REGION 1..158: note = MG4-82 HNH domain
DLKQPRKVREERSKSMRKNEALRQQIIDDIRRFGIANPSETDILKVRLADECNWQCPYTGKAISMETLLGPHPQFDIEHIQPYSRSLDNSFTNKTLCDVHENRIAKRNLTPFEAYSGDEQRWHEIIARVRRFRGPASPAKLRKFLAKAIDSDFVERQL

SEQ ID NO: 4136 - protein, 164 aa, unidentified
  REGION 1..164: note = Description of Unknown: uncultivated organism
  REGION 1..164: note = MG4-83 HNH domain
DMKRPRKARQQISKRIRANKNKRDAARQQLLKEASGALGSAWEPKRSDIEKWLLRDECGGICPYTGKPISFHSLFVEPEFDIEHIIPFSRSLDNSFLNKTLCCATENRIKSKRTPWEAYGGTARWDEIIGRVRKFTGDANVAKLQRFQIRDADKEIDGFAAREL

SEQ ID NO: 4137 - protein, 161 aa, unidentified
  REGION 1..161: note = Description of Unknown: uncultivated organism
  REGION 1..161: note = MG4-84 HNH domain
DLRKSPKQREQTWKKNRDNEALRKDAAEKLFREMGIQNPKRSDIEKMLLLQECGCMCPYTGKHISMRDLFGDAPQFDVEHIVPFSRSLDDSFLNKTLCEVAENRNVKGNRTPWEAYGHDLVRWNQILQRVSHFQGSAQREKLRRFQLQTIESPEQFASSQL

SEQ ID NO: 4138 - protein, 162 aa, unidentified; identical to SEQ ID NO: 4131
  REGION 1..162: note = Description of Unknown: uncultivated organism
  REGION 1..162: note = MG4-85 HNH domain

SEQ ID NO: 4139 - protein, 162 aa, unidentified; identical to SEQ ID NO: 4131
  REGION 1..162: note = Description of Unknown: uncultivated organism
  REGION 1..162: note = MG4-86 HNH domain

SEQ ID NO: 4140 - protein, 161 aa, unidentified
  REGION 1..161: note = Description of Unknown: uncultivated organism
  REGION 1..161: note = MG4-87 HNH domain
DLKHGRDRRAAITKQIRQREKQHADAKHRILAEIKGYEPTRIDREKVLLADECDWRCPYTGKKFGMKELIGEHPQVDVEHIWPFSRSFDNSFMNKTLCWHDENRRVKRGRTPYEAYSASPERYQEILGRVLAFKSDRRTVSEKFRRFTAEAIDEDFTNRHL

SEQ ID NO: 4141 - protein, 161 aa, unidentified
  REGION 1..161: note = Description of Unknown: uncultivated organism with predicted taxonomy: Planctomycetes bacterium
  REGION 1..161: note = MG4-88 HNH domain
DLRRSRKDRKRIAEQQREQETRRRKALERMMREFPNYQAKAGFDPAIEKILLAEECNWECPFTGRKIEMATLLGKNAQFDVAHLFPRRYLDDSFLNKTLCYHDENRHRMHDLLPKQAYGGDPQRWAEIIARVKAFKGSAATLKLERFLAAEVPEDFVESQL

SEQ ID NO: 4142 - protein, 161 aa, unidentified
  REGION 1..161: note = Description of Unknown: uncultivated organism with predicted taxonomy: Planctomicrobium piriforme
  REGION 1..161: note = MG4-89 HNH domain
DLKRARKQRERLSKEMREQEARRDSARAAIVRKAGLAGPSRSDIERYILAEECGFICPYTGKPMDRERLTDLVGRTPQFDVEHIWPLSRSLDDSYLNKTLCHVEENKAKGNRTPFEAYSQSPERWEQILDRVKRFGGTAARIKLERFTAKEIPDGFAERHL

SEQ ID NO: 4143 - protein, 162 aa, unidentified; identical to SEQ ID NO: 4117
  REGION 1..162: note = Description of Unknown: uncultivated organism
  REGION 1..162: note = MG4-90 HNH domain

SEQ ID NO: 4144 - protein, 166 aa, unidentified
  REGION 1..166: note = Description of Unknown: uncultivated organism with predicted taxonomy: Deltaproteobacteria bacterium
  REGION 1..166: note = MG4-91 HNH domain
ELKHGRSRREQTERRMRERAKQREAAAETIIRETTARGFRIDKPRRDDIEKYLLAEECGWICPYTGRSIGWESLFGPHPEFDIEHIWPFSRSLDNRFLNKRLCHAATNRSVKKNRTPYEAFGQDTEQWEQILDRVRRFKGDPYARREKLRRFEAQEIDEGFLERHL

SEQ ID NO: 4145 - protein, 158 aa, unidentified
  REGION 1..158: note = Description of Unknown: uncultivated organism with predicted taxonomy: Alphaproteobacteria
  REGION 1..158: note = MG4-92 HNH domain
DIKLGRKRRAEISKKMRTRQSEREDAKEQLRQWGVPVTHDAIERELLRRECNGVCPYTGREISPSQLFGESPQFDIEHIIPYSRSLDNSFANKTLCWHATNRNRKRGKTPYEVFSQDGDWEVILRRVAAFKGGYRDEKLRRFKLADLSEFDDFERRQL

SEQ ID NO: 4146 - protein, 158 aa, unidentified
  REGION 1..158: note = Description of Unknown: uncultivated organism with predicted taxonomy: Proteobacteria
  REGION 1..158: note = MG4-93 HNH domain
DIKLGRKRRAEISKKMRTRQSEREDAKEQLRQWGVPVTRDAIERELLRRECNGVCPYTGREISPSHLFGESPQFDIEHIIPYSRSLDNSFANKTLCWHATNRNRKRGKTPYEVFSQDGDWEVILRRVAAFKGGYRDEKLRRFKLADLSEFDDFERRQL

SEQ ID NO: 4147 - protein, 165 aa, unidentified
  REGION 1..165: note = Description of Unknown: uncultivated organism with predicted taxonomy: Planctomycetales bacterium 4484_113
  REGION 1..165: note = MG4-94 HNH domain
DVAQPAKRRQQAWKQNRQQERARKDAAERITKEAGIEKPSRDDILKVLLADECNWECPYTGRRINITELFGEHPQFDIEHIIPFDRCLDDSYVNKTLCEANENRNIKKGKTPYEAYYGTDKWENIISRVSRFNGRDRIKQAKLRRFKMHGEELEEFLDNFTNRQL

SEQ ID NO: 4148 - protein, 161 aa, unidentified
  REGION 1..161: note = Description of Unknown: uncultivated organism with predicted taxonomy: Planctomycetes bacterium
  REGION 1..161: note = MG4-95 HNH domain
DLRNSAKQRKNIMKKIEDNRKAREKAAEGILKEMPHFGEPKRADREKWLLADECNWECPYTGRQISVSALFGENPQFDVEHIIPFSRSLDDSFLNKTICEIAENRNVKRNYTPYEAYGRDEEKWNQILHRVKNFRGRAGNLKLERFQVKEAKFEDFASQQL

SEQ ID NO: 4149 - protein, 165 aa, unidentified; identical to SEQ ID NO: 4147
  REGION 1..165: note = Description of Unknown: uncultivated organism with predicted taxonomy: Planctomycetales bacterium 4484_113
  REGION 1..165: note = MG4-96 HNH domain

SEQ ID NO: 4150 - protein, 164 aa, unidentified
  REGION 1..164: note = Description of Unknown: uncultivated organism with predicted taxonomy: Planctomycetes bacterium
  REGION 1..164: note = MG4-97 HNH domain
DLKAPKQIRLRRSRQMRRNEAERKSARKELIEQGLPEPTGRDIEKYRLWKECGKRCPYTGKMISFSDLFGPHPKFDIEHIIPWHRCLLDSFANKTLCEVQENRSRKGNRTPYEAYSGDPDRYEEIKQRVREFTGPFGKAKLRRFRCEDIQKLPESLPLYGGEQL

SEQ ID NO: 4151 - protein, 163 aa, unidentified
  REGION 1..163: note = Description of Unknown: uncultivated organism
  REGION 1..163: note = MG4-98 HNH domain
ELKQSPKQRQETTKRMRRNEKERNDIREQIRNETGIENPTYTDILKVRLAKECNWECPYTGTHISMQQLIGPHPQFDIEHIIPHYRSLDNSFTNLTLCEARENREVKRNRTPYEAYHDTAKWEDIIRRVERFDGPMRNAKLRRFLLQGEELEKFLDGFTNRQL

SEQ ID NO: 4152 - protein, 161 aa, unidentified; identical to SEQ ID NO: 4148
  REGION 1..161: note = Description of Unknown: uncultivated organism with predicted taxonomy: Planctomycetes bacterium
  REGION 1..161: note = MG4-99 HNH domain

SEQ ID NO: 4153 - protein, 161 aa, unidentified; identical to SEQ ID NO: 4148
  REGION 1..161: note = Description of Unknown: uncultivated organism with predicted taxonomy: Planctomycetes bacterium
  REGION 1..161: note = MG4-100 HNH domain

SEQ ID NO: 4154 - protein, 163 aa, unidentified; identical to SEQ ID NO: 4151
  REGION 1..163: note = Description of Unknown: uncultivated organism
  REGION 1..163: note = MG4-101 HNH domain

SEQ ID NO: 4155 - protein, 163 aa, unidentified
  REGION 1..163: note = Description of Unknown: uncultivated organism
  REGION 1..163: note = MG4-102 HNH domain
EMKLSANRKKEIIKRNRDLEKQREKAAEKIRDVFPGMTPGRTDTTKVLLAEECGWRCPYTGRSISIRTLFGPHPQFDIEHIIPRSRSLDDSFLNKTLCYHEENRNVKRNRTPYEAYHGTPRYDEILDRVAKFNGRLAKEKLRRFRMTPEEVEDRFADFTQRQL

SEQ ID NO: 4156 - protein, 163 aa, unidentified; identical to SEQ ID NO: 4155
  REGION 1..163: note = Description of Unknown: uncultivated organism
  REGION 1..163: note = MG4-103 HNH domain

SEQ ID NO: 4157 - protein, 156 aa, unidentified
  REGION 1..156: note = Description of Unknown: uncultivated organism with predicted taxonomy: Planctomycetes bacterium
  REGION 1..156: note = MG4-104 HNH domain
DLKNSSKDRENITRRNRLREKERERIAREIAQEAGVEKPSRRDILKVMLAEECDYTCPYTGRRFSMRDLLHGGLVHIEHIVPYSRSMDDSFINKTLSCRDANAEKGNRLPFEVFSPEAYREILERVRRFKGPFAEAKLERFKMQKAESRDFIERNL

SEQ ID NO: 4158 - protein, 156 aa, unidentified
  REGION 1..156: note = Description of Unknown: uncultivated organism
  REGION 1..156: note = MG4-105 HNH domain
DLKNSSKDRENITRRNRLREKERERIAREIAQEAGVEKPSRRDILKVMLAEECDYTCPYTGRRFSMRDLLHGGLVHIEHIVPYSRSMDDSFINKTLSCRDANAEKGNRLPFEAFSPEAYREILERVRRFKGPFAEAKLERFKMQKAESRDFIERNL

SEQ ID NO: 4159 - protein, 156 aa, unidentified
  REGION 1..156: note = Description of Unknown: uncultivated organism
  REGION 1..156: note = MG4-106 HNH domain
DLKNSSKDRENISRKNSEREKERKKIAEKIAREAGIENPSPRDILKVMLAEECDYTCPYTGKSFSLNQLLHGGEIHIEHIVPYSRSMDDSYANKTLSYRDANMAKSDKLPFEAFDSAKYVEIIERVRHFKGSFAKIKLEKFELETAEVQDFINRNL

SEQ ID NO: 4160 - protein, 156 aa, unidentified; identical to SEQ ID NO: 4159
  REGION 1..156: note = Description of Unknown: uncultivated organism
  REGION 1..156: note = MG4-107 HNH domain

SEQ ID NO: 4161 - protein, 156 aa, unidentified; identical to SEQ ID NO: 4158
  REGION 1..156: note = Description of Unknown: uncultivated organism
  REGION 1..156: note = MG4-108 HNH domain

SEQ ID NO: 4162 - protein, 156 aa, unidentified; identical to SEQ ID NO: 4157
  REGION 1..156: note = Description of Unknown: uncultivated organism with predicted taxonomy: Planctomycetes bacterium
  REGION 1..156: note = MG4-109 HNH domain

SEQ ID NO: 4163 - protein, 156 aa, unidentified
  REGION 1..156: note = Description of Unknown: uncultivated organism
  REGION 1..156: note = MG4-110 HNH domain
DLKNSSKDRENIARRNRLREKERERIAREIAQEAGVEKPSRRDILKVMLAEECDYTCPYTGRRFSMRDLLHGGLVHIEHIVPYSRSMDDSFINKTLSCRDANAEKGNRLPFEAFSPEAYREILERVRRFKGPFAEAKLERFKLQKAESRDFIERNL

SEQ ID NO: 4164 - protein, 156 aa, unidentified
  REGION 1..156: note = Description of Unknown: uncultivated organism with predicted taxonomy: Planctomycetes bacterium
  REGION 1..156: note = MG4-111 HNH domain
DLKNSSKDRENISRKNSEREKERKKIAEKIAREAGIENPSPRDILKVMLAEECDYTCPYTGKSFSLNQLLHGGEIHIEHIVPYSRSMDDSYANKTLSYRDANMAKSDKLPFEAFDSAKYAEIIERVRHFKGSFAKIKLEKFELETAEVQDFINRNL

SEQ ID NO: 4165 - protein, 156 aa, unidentified; identical to SEQ ID NO: 4158
  REGION 1..156: note = Description of Unknown: uncultivated organism
  REGION 1..156: note = MG4-112 HNH domain

SEQ ID NO: 4166 - protein, 156 aa, unidentified; identical to SEQ ID NO: 4159
  REGION 1..156: note = Description of Unknown: uncultivated organism
  REGION 1..156: note = MG4-113 HNH domain

SEQ ID NO: 4167 - protein, 156 aa, unidentified; identical to SEQ ID NO: 4158
  REGION 1..156: note = Description of Unknown: uncultivated organism
  REGION 1..156: note = MG4-114 HNH domain

SEQ ID NO: 4168 - protein, 156 aa, unidentified; identical to SEQ ID NO: 4158
  REGION 1..156: note = Description of Unknown: uncultivated organism
  REGION 1..156: note = MG4-115 HNH domain

SEQ ID NO: 4169 - protein, 159 aa, unidentified
  REGION 1..159: note = Description of Unknown: uncultivated organism
  REGION 1..159: note = MG4-116 HNH domain
DLKKPRQERARATDLNRKRQRERDSVKERIVREGGLERPSRDDIEKVLLWEECGGICPYTGKSIAFASLFGEHPQFGVEHIIPFSRLPDNSFQNKTLCDHEQGRNVKRNKTPFEAYPNTEEYDAILTRIKAWETPNLGKQKRFELRTLEELEGFSTRQL

SEQ ID NO: 4170 - protein, 157 aa, unidentified
  REGION 1..157: note = Description of Unknown: uncultivated organism with predicted taxonomy: Acidobacteriales bacterium 59-55
  REGION 1..157: note = MG4-117 HNH domain
ELKKPRQERIEATKKNRNRQREREDVAVRILRECGLSNPSRRDIEKARLHEECGGYCPYTGRHIPFSTLFDNSEFDVEHIIPRSRYPDDSFQNKTLCYLPENRDVKKGQTPWEAYGKDEQRWAEIMTRVSSWKNRGKMARFAIQTEEALGDFSARQM

SEQ ID NO: 4171 - protein, 159 aa, unidentified; identical to SEQ ID NO: 4169
  REGION 1..159: note = Description of Unknown: uncultivated organism
  REGION 1..159: note = MG4-118 HNH domain

SEQ ID NO: 4172 - protein, 157 aa, unidentified; identical to SEQ ID NO: 4170
  REGION 1..157: note = Description of Unknown: uncultivated organism
  REGION 1..157: note = MG4-119 HNH domain

SEQ ID NO: 4173 - protein, 159 aa, unidentified; identical to SEQ ID NO: 4169
  REGION 1..159: note = Description of Unknown: uncultivated organism
  REGION 1..159: note = MG4-120 HNH domain

SEQ ID NO: 4174 - protein, 157 aa, unidentified
  REGION 1..157: note = Description of Unknown: uncultivated organism with predicted taxonomy: Acidobacteriales bacterium 59-55
  REGION 1..157: note = MG4-121 HNH domain
ELKKPRQERIEATKKNRNRQREREDVAVRILRECGLSNPSRRDIEKARLHEECGGYCPYTGRHIPFSTLFDNSEFDVEHIIPRSRYPDDSFQNKTLCYLPENRDVKKGQTPWEAYGKDEQRWAEIMTRVSSWKNRGKMSRFAIQTEEALGDFSARQM

SEQ ID NO: 4175 - protein, 157 aa, unidentified
  REGION 1..157: note = Description of Unknown: uncultivated organism with predicted taxonomy: uncultured bacterium
  REGION 1..157: note = MG4-122 HNH domain
ELKKPRQERLEATKKNRTRQREREDIAGRILRECGLSNPSRKDIEKARLHEECGGICPYTGRPIPFSTLFDNSEFDVEHIIPRSRYPDDSFQNKTLCYLPENRDVKKGQTPWEAYGKDEQRWAEIMTRVGSWKNRGKMARFSIQTEEALGEFSARQM

SEQ ID NO: 4176 - protein, 159 aa, unidentified; identical to SEQ ID NO: 4169
  REGION 1..159: note = Description of Unknown: uncultivated organism
  REGION 1..159: note = MG4-123 HNH domain

SEQ ID NO: 4177 - protein, 159 aa, unidentified; identical to SEQ ID NO: 4169
  REGION 1..159: note = Description of Unknown: uncultivated organism
  REGION 1..159: note = MG4-124 HNH domain

SEQ ID NO: 4178 - protein, 159 aa, unidentified; identical to SEQ ID NO: 4169
  REGION 1..159: note = Description of Unknown: uncultivated organism
  REGION 1..159: note = MG4-125 HNH domain

SEQ ID NO: 4179 - protein, 160 aa, unidentified
  REGION 1..160: note = Description of Unknown: uncultivated organism
  REGION 1..160: note = MG4-126 HNH domain
DLKKPRHERAEAFKYKRKWEKQRIDTKEKMLRELGPGFEYPSRADVEKALLWEECQGECPYTGKRFPFSSLYGENPPLQVEHIIPFSRIPDDSFQNKILCYHEDNQHKANRTPFEAYTDPAQYETILSRVRNWRTPNPGKQCRFELRTLEELEGFSERQL

SEQ ID NO: 4180 - protein, 157 aa, unidentified; identical to SEQ ID NO: 4175
  REGION 1..157: note = Description of Unknown: uncultivated organism
  REGION 1..157: note = MG4-127 HNH domain

SEQ ID NO: 4181 - protein, 157 aa, unidentified; identical to SEQ ID NO: 4170
  REGION 1..157: note = Description of Unknown: uncultivated organism with predicted taxonomy: Acidobacteriales bacterium 59-55
  REGION 1..157: note = MG4-128 HNH domain

SEQ ID NO: 4182 - protein, 160 aa, unidentified
  REGION 1..160: note = Description of Unknown: uncultivated organism
  REGION 1..160: note = MG4-129 HNH domain
ELKKPRSKRLDETARNRKREAENKALAERMHNECGTPQNPSRNDLEKAKLWVEQQGECPYTGRSLPFSRLFDDNNGFDVDHILPRSRHPDDSYQNKVLCWGDTNRMVKRNQTPYEAFAEQDPENWHQILARVARWKNPGKLRKFEIRSTDDLAEFSSRQL

SEQ ID NO: 4183 - protein, 161 aa, unidentified
  REGION 1..161: note = Description of Unknown: uncultivated organism with predicted taxonomy: Planctomycetes
  REGION 1..161: note = MG4-130 HNH domain
DLKKSRQQREDLTKQNRDNEKARDAARTKIAERLHCDENAVSNLDILKVRLAEECNWECPYTGKSIAIEALVGKHAQFDIEHIIPFSRSLDNSFLNKTLCDNHFNRHVKKNGTPHETCSSNEREWQEIIGRVKRFRGSAAHAKLRKFQQEKPDEDFAARML

SEQ ID NO: 4184 - protein, 157 aa, unidentified; identical to SEQ ID NO: 4170
  REGION 1..157: note = Description of Unknown: uncultivated organism
  REGION 1..157: note = MG4-131 HNH domain

SEQ ID NO: 4185 - protein, 165 aa, unidentified
  REGION 1..165: note = Description of Unknown: uncultivated organism with predicted taxonomy: Planctomycetes bacterium
  REGION 1..165: note = MG4-132 HNH domain
ELKKPRSKRLDETANNRKREAENRALAKRMHEECGIPQPPSRKDLEKAKLWVEQATGAGVCECPYTGKKLPFSRLFDDDNGFDVDHILPRSRHPDDSFQNKVLCWGEENRMHKRNQTPYEAYAEQDQERWQEILARVTRWKNPGKLRKFEIRSTDELEAFSSRQL

SEQ ID NO: 4186 - protein, 160 aa, unidentified; identical to SEQ ID NO: 4179
  REGION 1..160: note = Description of Unknown: uncultivated organism
  REGION 1..160: note = MG4-133 HNH domain

SEQ ID NO: 4187 - protein, 157 aa, unidentified; identical to SEQ ID NO: 4170
  REGION 1..157: note = Description of Unknown: uncultivated organism with predicted taxonomy: Acidobacteriales bacterium 59-55
  REGION 1..157: note = MG4-134 HNH domain

SEQ ID NO: 4188 - protein, 157 aa, unidentified; identical to SEQ ID NO: 4170
  REGION 1..157: note = Description of Unknown: uncultivated organism with predicted taxonomy: Acidobacteriales bacterium 59-55
  REGION 1..157: note = MG4-135 HNH domain

SEQ ID NO: 4189 - protein, 157 aa, unidentified; identical to SEQ ID NO: 4170
  REGION 1..157: note = Description of Unknown: uncultivated organism with predicted taxonomy: Acidobacteriales bacterium 59-55
  REGION 1..157: note = MG4-136 HNH domain

SEQ ID NO: 4190 - protein, 165 aa, unidentified; identical to SEQ ID NO: 4185
  REGION 1..165: note = Description of Unknown: uncultivated organism with predicted taxonomy: Acidobacteriales bacterium 59-55
  REGION 1..165: note = MG4-137 HNH domain

SEQ ID NO: 4191 - protein, 160 aa, unidentified
  REGION 1..160: note = Description of Unknown: uncultivated organism with predicted taxonomy: uncultured bacterium
  REGION 1..160: note = MG4-138 HNH domain
DLKKPRHERAKAVSYNRDREKQRTTAKEKMLREVGPGFQHPSRADVEKALLWEECQGECPYTGKRFPFSSLFGENPPLQVDHIIPFSRIPDDSFQNKTLCYHEENQHKGNRTPFEAYTDPAQYEAILNRVRSWRTPNPGKQRRFELRTLEELEGFSERQL

SEQ ID NO: 4192 - protein, 158 aa, unidentified
  REGION 1..158: note = Description of Unknown: uncultivated organism
  REGION 1..158: note = MG4-139 HNH domain
ELKKSRRERMESVSTNRDREKQRNAAKEKLLKELGLQHPSRADIEKALLWEECQGVCPYTGKQFPFSSLFGENPSMQVQHIIPFSRIPDDSFQNKTLCSVEENQYKANRTPFEAYADPAQYEAILDRVKNWPRPNRGKQRRFELRTLEELEGFSSRQL

SEQ ID NO: 4193 - protein, 168 aa, unidentified
  REGION 1..168: note = Description of Unknown: uncultivated organism with predicted taxonomy: Planctomycetes bacterium
  REGION 1..168: note = MG4-140 HNH domain
ELRKNRKQRQNATEAGDKQHLRRIDAARTILRECRNYDAQGRDAERLVRERRDDVTKMLLLMECRCLCPYTGDSISYLDLFGGEVEVEHIIPQSLMVDNSFNNLTLCYRKVNHEKLDKTPRQAFCRAEDDQQWIDIIGRVQKFGNKEKLHRFLLSSREDIDRFSNRRL

SEQ ID NO: 4194 - protein, 160 aa, unidentified; identical to SEQ ID NO: 4179
  REGION 1..160: note = Description of Unknown: uncultivated organism
  REGION 1..160: note = MG4-141 HNH domain

SEQ ID NO: 4195 - protein, 160 aa, unidentified; identical to SEQ ID NO: 4182
  REGION 1..160: note = Description of Unknown: uncultivated organism with predicted taxonomy: Polaribacter sp. ALD11
  REGION 1..160: note = MG4-142 HNH domain

SEQ ID NO: 4196 - protein, 157 aa, unidentified; identical to SEQ ID NO: 4170
  REGION 1..157: note = Description of Unknown: uncultivated organism
  REGION 1..157: note = MG4-143 HNH domain

SEQ ID NO: 4197 - protein, 157 aa, unidentified; identical to SEQ ID NO: 4175
  REGION 1..157: note = Description of Unknown: uncultivated organism
  REGION 1..157: note = MG4-144 HNH domain

SEQ ID NO: 4198 - protein, 160 aa, unidentified; identical to SEQ ID NO: 4179
  REGION 1..160: note = Description of Unknown: uncultivated organism
  REGION 1..160: note = MG4-145 HNH domain

SEQ ID NO: 4199 - protein, 157 aa, unidentified; identical to SEQ ID NO: 4170
  REGION 1..157: note = Description of Unknown: uncultivated organism with predicted taxonomy: Acidobacteriales bacterium 59-55
  REGION 1..157: note = MG4-146 HNH domain

SEQ ID NO: 4200 - protein, 160 aa, unidentified; identical to SEQ ID NO: 4179
  REGION 1..160: note = Description of Unknown: uncultivated organism
  REGION 1..160: note = MG4-147 HNH domain

SEQ ID NO: 4201 - protein, 157 aa, unidentified; identical to SEQ ID NO: 4170
  REGION 1..157: note = Description of Unknown: uncultivated organism
  REGION 1..157: note = MG4-148 HNH domain

SEQ ID NO: 4202 - protein, 157 aa, unidentified; identical to SEQ ID NO: 4170
  REGION 1..157: note = Description of Unknown: uncultivated organism
  REGION 1..157: note = MG4-149 HNH domain

SEQ ID NO: 4203 - protein, 160 aa, unidentified
  REGION 1..160: note = Description of Unknown: uncultivated organism with predicted taxonomy: Polaribacter sp. ALD11
  REGION 1..160: note = MG4-150 HNH domain
ELKKPRSKRLDETARNRKREAENKALAERMHNECGMPQNSSRNDLEKAKLWVEQQGQCPYTGRSLPFSRLFDDNNGFDVDHILPRSRHPDDSYQNKVLCWGDTNRMVKRNQTPYEAFAEQDPENWHQILARVARWKNPGKSRKFEIRSTDELAEFSSRQL

SEQ ID NO: 4204 - protein, 165 aa, unidentified; identical to SEQ ID NO: 4185
  REGION 1..165: note = Description of Unknown: uncultivated organism with predicted taxonomy: Acidobacteriales
  REGION 1..165: note = MG4-151 HNH domain

SEQ ID NO: 4205 - protein, 160 aa, unidentified; identical to SEQ ID NO: 4179
  REGION 1..160: note = Description of Unknown: uncultivated organism
  REGION 1..160: note = MG4-152 HNH domain

SEQ ID NO: 4206 - protein, 157 aa, unidentified; identical to SEQ ID NO: 4170
  REGION 1..157: note = Description of Unknown: uncultivated organism
  REGION 1..157: note = MG4-153 HNH domain

SEQ ID NO: 4207 - protein, 157 aa, unidentified
  REGION 1..157: note = Description of Unknown: uncultivated organism with predicted taxonomy: Acidobacteriales bacterium 59-55
  REGION 1..157: note = MG4-154 HNH domain
ELKKPRQERLEATKKNRTRQREREDIAGKILRECGLSNPSRKDIEKARLHEECGGICPYTGRHIPFSTLFDNSEFDVEHIIPRSRYPDDSFQNKTLCYLPENRDVKKGQTPWEAYGKDEQRWAEIMTRVGSWKNRGKMARFSIQTEEALGEFSARQM

SEQ ID NO: 4208 - protein, 161 aa, unidentified
  REGION 1..161: note = Description of Unknown: uncultivated organism with predicted taxonomy: Deltaproteobacteria
  REGION 1..161: note = MG4-155 HNH domain
DLKASRPEREDRWARMRRNEKARAEAAAKIQSEIGIHTPGRADTEKWLLAEECHWRCPYSGRGFSATQLYQSGEIQVEHIIPFSRSLDDSFANKTLAYSWVNKAKGNRSPREAFQEQSQWEAILTEVGSFHGPYAKHKLQRFQWTSEQIAELLDDFTKRQL

SEQ ID NO: 4209 - protein, 163 aa, unidentified
  REGION 1..163: note = Description of Unknown: uncultivated organism with predicted taxonomy: Planctomycetes bacterium
  REGION 1..163: note = MG4-156 HNH domain
ELKKPAKARERIAQENRQREDLRKKTIERIFRECGLGKPSNADIEKAILWEECQHHDPYTGGSINFHDLFGSDAKWEIEHIIPHSRSQDDSLTNKTLCSRETNRQKGNRTPFEVFGNTPEWEAMVERVTKFQGDKRAMTRKLARFTMEGGVEELFGEFTQRQL

SEQ ID NO: 4210 - protein, 157 aa, unidentified; identical to SEQ ID NO: 4170
  REGION 1..157: note = Description of Unknown: uncultivated organism
  REGION 1..157: note = MG4-157 HNH domain

SEQ ID NO: 4211 - protein, 157 aa, unidentified; identical to SEQ ID NO: 4170
  REGION 1..157: note = Description of Unknown: uncultivated organism
  REGION 1..157: note = MG4-158 HNH domain

SEQ ID NO: 4212 - protein, 157 aa, unidentified; identical to SEQ ID NO: 4170
  REGION 1..157: note = Description of Unknown: uncultivated organism with predicted taxonomy: Acidobacteriales bacterium 59-55
  REGION 1..157: note = MG4-159 HNH domain

SEQ ID NO: 4213 - protein, 161 aa, unidentified; identical to SEQ ID NO: 4183
  REGION 1..161: note = Description of Unknown: uncultivated organism with predicted taxonomy: Planctomycetes
  REGION 1..161: note = MG4-160 HNH domain

SEQ ID NO: 4214 - protein, 157 aa, unidentified; identical to SEQ ID NO: 4170
  REGION 1..157: note = Description of Unknown: uncultivated organism with predicted taxonomy: Acidobacteriales bacterium 59-55
  REGION 1..157: note = MG4-161 HNH domain

SEQ ID NO: 4215 - protein, 160 aa, unidentified; identical to SEQ ID NO: 4076
  REGION 1..160: note = Description of Unknown: uncultivated organism
  REGION 1..160: note = MG4-162 HNH domain

SEQ ID NO: 4216 - protein, 160 aa, unidentified; identical to SEQ ID NO: 4182
  REGION 1..160: note = Description of Unknown: uncultivated organism with predicted taxonomy: Acidobacteriales bacterium 59-55
  REGION 1..160: note = MG4-163 HNH domain

SEQ ID NO: 4217 - protein, 160 aa, unidentified; identical to SEQ ID NO: 4179
  REGION 1..160: note = Description of Unknown: uncultivated organism
  REGION 1..160: note = MG4-164 HNH domain

SEQ ID NO: 4218 - protein, 157 aa, unidentified; identical to SEQ ID NO: 4170
  REGION 1..157: note = Description of Unknown: uncultivated organism
  REGION 1..157: note = MG4-165 HNH domain

SEQ ID NO: 4219 - protein, 157 aa, unidentified; identical to SEQ ID NO: 4207
  REGION 1..157: note = Description of Unknown: uncultivated organism with predicted taxonomy: Candidatus Sulfotelmatomonas gaucii
  REGION 1..157: note = MG4-166 HNH domain

SEQ ID NO: 4220 - protein, 165 aa, unidentified; identical to SEQ ID NO: 4185
  REGION 1..165: note = Description of Unknown: uncultivated organism with predicted taxonomy: Acidobacteriales bacterium 59-55
  REGION 1..165: note = MG4-167 HNH domain

SEQ ID NO: 4221 - protein, 160 aa, unidentified; identical to SEQ ID NO: 4179
  REGION 1..160: note = Description of Unknown: uncultivated organism
  REGION 1..160: note = MG4-168 HNH domain

SEQ ID NO: 4222 - protein, 157 aa, unidentified; identical to SEQ ID NO: 4170
  REGION 1..157: note = Description of Unknown: uncultivated organism
  REGION 1..157: note = MG4-169 HNH domain

SEQ ID NO: 4223 - protein, 160 aa, unidentified; identical to SEQ ID NO: 4179
  REGION 1..160: note = Description of Unknown: uncultivated organism
  REGION 1..160: note = MG4-170 HNH domain

SEQ ID NO: 4224 - protein, 157 aa, unidentified; identical to SEQ ID NO: 4170
  REGION 1..157: note = Description of Unknown: uncultivated organism
  REGION 1..157: note = MG4-171 HNH domain

SEQ ID NO: 4225 - protein, 157 aa, unidentified; identical to SEQ ID NO: 4170
  REGION 1..157: note = Description of Unknown: uncultivated organism
  REGION 1..157: note = MG4-172 HNH domain

SEQ ID NO: 4226 - protein, 167 aa, unidentified
  REGION 1..167: note = Description of Unknown: uncultivated organism with predicted taxonomy: Ignavibacteriales bacterium CG_4_9_14_3_um_filter_30_11
  REGION 1..167: note = MG4-173 HNH domain
DLKKSKKERQKQTEINRDREKLRQEATGELRKHDVVRFANPRNSDIEKYLLATEARWQCPYTSKKYGVTDVFGDHPQVDVEHIIPRSRSLDDSYLNKTLAYRSANMEKGNRTPREWLFESDQEQYDRMIGVVSGFDPRFEVGKKLRRFSMELSDPDSLLKEFTERQL

SEQ ID NO: 4227 - protein, 160 aa, unidentified; identical to SEQ ID NO: 4191
  REGION 1..160: note = Description of Unknown: uncultivated organism with predicted taxonomy: uncultured bacterium
  REGION 1..160: note = MG4-174 HNH domain

SEQ ID NO: 4228 - protein, 160 aa, unidentified; identical to SEQ ID NO: 4179
  REGION 1..160: note = Description of Unknown: uncultivated organism
  REGION 1..160: note = MG4-175 HNH domain

SEQ ID NO: 4229 - protein, 157 aa, unidentified; identical to SEQ ID NO: 4170
  REGION 1..157: note = Description of Unknown: uncultivated organism with predicted taxonomy: Acidobacteriales bacterium 59-55
  REGION 1..157: note = MG4-176 HNH domain

SEQ ID NO: 4230 - protein, 168 aa, unidentified; identical to SEQ ID NO: 4193
  REGION 1..168: note = Description of Unknown: uncultivated organism
  REGION 1..168: note = MG4-177 HNH domain

SEQ ID NO: 4231 - protein, 157 aa, unidentified; identical to SEQ ID NO: 4170
  REGION 1..157: note = Description of Unknown: uncultivated organism with predicted taxonomy: Acidobacteriales bacterium 59-55
  REGION 1..157: note = MG4-178 HNH domain

SEQ ID NO: 4232 - protein, 160 aa, unidentified; identical to SEQ ID NO: 4182
  REGION 1..160: note = Description of Unknown: uncultivated organism with predicted taxonomy: Acidobacteria
  REGION 1..160: note = MG4-179 HNH domain

SEQ ID NO: 4233 - protein, 157 aa, unidentified; identical to SEQ ID NO: 4175
  REGION 1..157: note = Description of Unknown: uncultivated organism
  REGION 1..157: note = MG4-180 HNH domain

SEQ ID NO: 4234 - protein, 160 aa, unidentified; identical to SEQ ID NO: 4179
  REGION 1..160: note = Description of Unknown: uncultivated organism
  REGION 1..160: note = MG4-181 HNH domain

SEQ ID NO: 4235 - protein, 157 aa, unidentified; identical to SEQ ID NO: 4170
  REGION 1..157: note = Description of Unknown: uncultivated organism
  REGION 1..157: note = MG4-182 HNH domain

SEQ ID NO: 4236 - protein, 160 aa, unidentified; identical to SEQ ID NO: 4191
  REGION 1..160: note = Description of Unknown: uncultivated organism
  REGION 1..160: note = MG4-183 HNH domain

SEQ ID NO: 4237 - protein, 157 aa, unidentified; identical to SEQ ID NO: 4175
  REGION 1..157: note = Description of Unknown: uncultivated organism
  REGION 1..157: note = MG4-184 HNH domain

SEQ ID NO: 4238 - protein, 157 aa, unidentified; identical to SEQ ID NO: 4170
  REGION 1..157: note = Description of Unknown: uncultivated organism
  REGION 1..157: note = MG4-185 HNH domain

SEQ ID NO: 4239 - protein, 160 aa, unidentified; identical to SEQ ID NO: 4179
  REGION 1..160: note = Description of Unknown: uncultivated organism
  REGION 1..160: note = MG4-186 HNH domain

SEQ ID NO: 4240 - protein, 160 aa, unidentified; identical to SEQ ID NO: 4182
  REGION 1..160: note = Description of Unknown: uncultivated organism with predicted taxonomy: Polaribacter sp. ALD11
  REGION 1..160: note = MG4-187 HNH domain

SEQ ID NO: 4241 - protein, 157 aa, unidentified; identical to SEQ ID NO: 4170
  REGION 1..157: note = Description of Unknown: uncultivated organism with predicted taxonomy: Acidobacteriales bacterium 59-55
  REGION 1..157: note = MG4-188 HNH domain

SEQ ID NO: 4242 - protein, 160 aa, unidentified; identical to SEQ ID NO: 4182
  REGION 1..160: note = Description of Unknown: uncultivated organism with predicted taxonomy: Polaribacter sp. ALD11
  REGION 1..160: note = MG4-189 HNH domain

SEQ ID NO: 4243 - protein, 157 aa, unidentified; identical to SEQ ID NO: 4175
  REGION 1..157: note = Description of Unknown: uncultivated organism
  REGION 1..157: note = MG4-190 HNH domain

SEQ ID NO: 4244 - protein, 160 aa, unidentified; identical to SEQ ID NO: 4179
  REGION 1..160: note = Description of Unknown: uncultivated organism
  REGION 1..160: note = MG4-191 HNH domain

SEQ ID NO: 4245 - protein, 157 aa, unidentified; identical to SEQ ID NO: 4170
  REGION 1..157: note = Description of Unknown: uncultivated organism
  REGION 1..157: note = MG4-192 HNH domain

SEQ ID NO: 4246 - protein, 157 aa, unidentified; identical to SEQ ID NO: 4170
  REGION 1..157: note = Description of Unknown: uncultivated organism with predicted taxonomy: Acidobacteriales bacterium 59-55
  REGION 1..157: note = MG4-193 HNH domain

SEQ ID NO: 4247 - protein, 160 aa, unidentified; identical to SEQ ID NO: 4179
  REGION 1..160: note = Description of Unknown: uncultivated organism
  REGION 1..160: note = MG4-194 HNH domain

SEQ ID NO: 4248 - protein, 157 aa, unidentified; identical to SEQ ID NO: 4170
  REGION 1..157: note = Description of Unknown: uncultivated organism
  REGION 1..157: note = MG4-195 HNH domain

SEQ ID NO: 4249 - protein, 160 aa, unidentified; identical to SEQ ID NO: 4182
  REGION 1..160: note = Description of Unknown: uncultivated organism with predicted taxonomy: Acidobacteriales bacterium 59-55
  REGION 1..160: note = MG4-196 HNH domain

SEQ ID NO: 4250 - protein, 157 aa, unidentified; identical to SEQ ID NO: 4170
  REGION 1..157: note = Description of Unknown: uncultivated organism
  REGION 1..157: note = MG4-197 HNH domain

SEQ ID NO: 4251 - protein, 163 aa, unidentified; identical to SEQ ID NO: 4209
  REGION 1..163: note = Description of Unknown: uncultivated organism
  REGION 1..163: note = MG4-198 HNH domain

SEQ ID NO: 4252 - protein, 160 aa, unidentified; identical to SEQ ID NO: 4179
  REGION 1..160: note = Description of Unknown: uncultivated organism
  REGION 1..160: note = MG4-199 HNH domain

SEQ ID NO: 4253 - protein, 160 aa, unidentified; identical to SEQ ID NO: 4179
  REGION 1..160: note = Description of Unknown: uncultivated organism
  REGION 1..160: note = MG4-200 HNH domain

SEQ ID NO: 4254 - protein, 160 aa, unidentified; identical to SEQ ID NO: 4182
  REGION 1..160: note = Description of Unknown: uncultivated organism with predicted taxonomy: Acidobacteriales bacterium 59-55
  REGION 1..160: note = MG4-201 HNH domain

SEQ ID NO: 4255 - protein, 157 aa, unidentified; identical to SEQ ID NO: 4170
  REGION 1..157: note = Description of Unknown: uncultivated organism with predicted taxonomy: Acidobacteriales bacterium 59-55
  REGION 1..157: note = MG4-202 HNH domain

SEQ ID NO: 4256 - protein, 157 aa, unidentified; identical to SEQ ID NO: 4170
  REGION 1..157: note = Description of Unknown: uncultivated organism with predicted taxonomy: Acidobacteriales bacterium 59-55
  REGION 1..157: note = MG4-203 HNH domain

SEQ ID NO: 4257 - protein, 157 aa, unidentified; identical to SEQ ID NO: 4170
  REGION 1..157: note = Description of Unknown: uncultivated organism with predicted taxonomy: Acidobacteriales bacterium 59-55
  REGION 1..157: note = MG4-204 HNH domain

SEQ ID NO: 4258 - protein, 167 aa, unidentified
  REGION 1..167: note = Description of Unknown: uncultivated organism with predicted taxonomy: Acidobacteria
  REGION 1..167: note = MG4-205 HNH domain
DLKKSKKERQYQAELNREREKMRQEATEELRKYDAVRFANPRNTDIEKYLLAKEARWQCPYTNKKYGFTDVFGDHPQVDVEHIIPRSRSLDDSYVNKTLAYRSANAEKGNRTPREWLFESDQEQYEQMIRVVKQFDPRFEVGKKLRRFSMELSDPDSLLREFTERQL

SEQ ID NO: 4259 - protein, 157 aa, unidentified; identical to SEQ ID NO: 4170
  REGION 1..157: note = Description of Unknown: uncultivated organism
  REGION 1..157: note = MG4-206 HNH domain

SEQ ID NO: 4260 - protein, 167 aa, unidentified; identical to SEQ ID NO: 4258
  REGION 1..167: note = Description of Unknown: uncultivated organism
  REGION 1..167: note = MG4-207 HNH domain

SEQ ID NO: 4261 - protein, 157 aa, unidentified; identical to SEQ ID NO: 4175
  REGION 1..157: note = Description of Unknown: uncultivated organism
  REGION 1..157: note = MG4-208 HNH domain

SEQ ID NO: 4262 - protein, 160 aa, unidentified; identical to SEQ ID NO: 4179
  REGION 1..160: note = Description of Unknown: uncultivated organism
  REGION 1..160: note = MG4-209 HNH domain

SEQ ID NO: 4263 - protein, 168 aa, unidentified; identical to SEQ ID NO: 4193
  REGION 1..168: note = Description of Unknown: uncultivated organism with predicted taxonomy: candidate division Kazan bacterium
  REGION 1..168: note = MG4-210 HNH domain

SEQ ID NO: 4264 - protein, 160 aa, unidentified; identical to SEQ ID NO: 4182
  REGION 1..160: note = Description of Unknown: uncultivated organism with predicted taxonomy: Acidobacteriales bacterium 59-55
  REGION 1..160: note = MG4-211 HNH domain

SEQ ID NO: 4265 - protein, 157 aa, unidentified; identical to SEQ ID NO: 4175
  REGION 1..157: note = Description of Unknown: uncultivated organism
  REGION 1..157: note = MG4-212 HNH domain

SEQ ID NO: 4266 - protein, 160 aa, unidentified; identical to SEQ ID NO: 4182
  REGION 1..160: note = Description of Unknown: uncultivated organism with predicted taxonomy: Polaribacter sp. ALD11
  REGION 1..160: note = MG4-213 HNH domain

SEQ ID NO: 4267 - protein, 160 aa, unidentified; identical to SEQ ID NO: 4179
  REGION 1..160: note = Description of Unknown: uncultivated organism
  REGION 1..160: note = MG4-214 HNH domain

SEQ ID NO: 4268 - protein, 168 aa, unidentified; identical to SEQ ID NO: 4193
  REGION 1..168: note = Description of Unknown: uncultivated organism
  REGION 1..168: note = MG4-215 HNH domain

SEQ ID NO: 4269 - protein, 157 aa, unidentified; identical to SEQ ID NO: 4170
  REGION 1..157: note = Description of Unknown: uncultivated organism
  REGION 1..157: note = MG4-216 HNH domain

SEQ ID NO: 4270 - protein, 162 aa, unidentified
  REGION 1..162: note = Description of Unknown: uncultivated organism with predicted taxonomy: candidate division Zixibacteria bacterium CG_4_9_14_3_um_filter_46_8
  REGION 1..162: note = MG4-217 HNH domain
DLKQSKDHRLRATKNARDNEESRKAAIRKILAETPVRSPGPDDILRAQLYEECNHECPYTGRKIAFAALFGDSPQFDIEHIIPFSRCLDDSFANKTLCYHEVNRHVKGNRTPLEAFGSTPEWERIVQSVRLFSGKAAEGKLRRFLMTEEEILKLQDFANSQL

SEQ ID NO: 4271 - protein, 161 aa, unidentified
  REGION 1..161: note = Description of Unknown: uncultivated organism with predicted taxonomy: Planctomicrobium piriforme
  REGION 1..161: note = MG4-218 HNH domain
DMRRSKKQRQESWLRMRQNERDRKRAAQKILAEMNNDSPSRQDKEKVLLAEECNWTCPYTGKCISMQSLLGPTPQFDIEHIIPFSRSLDDSFTNKTLCDIAENRDHKRNRTPFEAYAAEPDKWNAILGRVGRFRSNAREEKVRRFRQEEIEGIEDFAARQL

SEQ ID NO: 4272 - protein, 157 aa, unidentified; identical to SEQ ID NO: 4207
  REGION 1..157: note = Description of Unknown: uncultivated organism with predicted taxonomy: Candidatus Sulfotelmatomonas gaucii
  REGION 1..157: note = MG4-219 HNH domain

SEQ ID NO: 4273 - protein, 162 aa, unidentified
  REGION 1..162: note = Description of Unknown: uncultivated organism with predicted taxonomy: Proteobacteria
  REGION 1..162: note = MG4-220 HNH domain
DLRKSRKEREANWKKNRDIEKSRKIMAERITAEAGITDPSREDIRKALLAKECGWVCPYTGRAISMRALVGPDAQFDIEHIIPFSQSLDNSFFNVTLCYHEENRNRKRNQTPYGAYGNEPEKFQEILDRVRRFDSDLADEKLKRFQLTDTADILKGFVDRQL

SEQ ID NO: 4274 - protein, 160 aa, unidentified; identical to SEQ ID NO: 4182
  REGION 1..160: note = Description of Unknown: uncultivated organism with predicted taxonomy: Acidobacteriales bacterium 59-55
  REGION 1..160: note = MG4-221 HNH domain

SEQ ID NO: 4275 - protein, 157 aa, unidentified; identical to SEQ ID NO: 4170
  REGION 1..157: note = Description of Unknown: uncultivated organism
  REGION 1..157: note = MG4-222 HNH domain

SEQ ID NO: 4276 - protein, 160 aa, unidentified; identical to SEQ ID NO: 4179
  REGION 1..160: note = Description of Unknown: uncultivated organism
  REGION 1..160: note = MG4-223 HNH domain

SEQ ID NO: 4277 - protein, 157 aa, unidentified; identical to SEQ ID NO: 4175
  REGION 1..157: note = Description of Unknown: uncultivated organism
  REGION 1..157: note = MG4-224 HNH domain

SEQ ID NO: 4278 - protein, 168 aa, unidentified; identical to SEQ ID NO: 4193
  REGION 1..168: note = Description of Unknown: uncultivated organism
  REGION 1..168: note = MG4-225 HNH domain

SEQ ID NO: 4279 - protein, 160 aa, unidentified; identical to SEQ ID NO: 4182
  REGION 1..160: note = Description of Unknown: uncultivated organism with predicted taxonomy: Polaribacter sp. ALD11
  REGION 1..160: note = MG4-226 HNH domain

SEQ ID NO: 4280 - protein, 160 aa, unidentified; identical to SEQ ID NO: 4179
  REGION 1..160: note = Description of Unknown: uncultivated organism
  REGION 1..160: note = MG4-227 HNH domain

SEQ ID NO: 4281 - protein, 164 aa, unidentified
  REGION 1..164: note = Description of Unknown: uncultivated organism
  REGION 1..164: note = MG4-247 HNH domain
DLKKSKKDREDIWKRNRENEKAREEAAKKILAEIPNLKPSRRDKEKVLLYEECGHKCPYTGKQISMASLLGDHPQFDIEHIIPFPRSLDDSFLNKTLCYAEENRNVKQGKTPHEAYGSNPTRWEEIIQRVKDFKGKARDIKLERFEAHGEKLDKLLGEFANRQL

SEQ ID NO: 4282 - protein, 164 aa, unidentified; identical to SEQ ID NO: 4281
  REGION 1..164: note = Description of Unknown: uncultivated organism with predicted taxonomy: Planctomycetes
  REGION 1..164: note = MG4-248 HNH domain

SEQ ID NO: 4283 - protein, 163 aa, unidentified
  REGION 1..163: note = Description of Unknown: uncultivated organism with predicted taxonomy: Fuerstia marisgermanicae
  REGION 1..163: note = MG4-249 HNH domain
ELKKPKKRRELISKRNDENRSERETARREITEETGDPYPGKTDIRKVLLRRECGDQCVYCGEQFSGSNFFSDDAPIEIDHIIPRSLHWDDSFLNLALCHAKCNREKGDNTPAQVFSDEVIEQIRDRIRRFSGNEKTKRERFRRFTLAGAELSAYLEEFSRRQL

SEQ ID NO: 4284 - protein, 163 aa, unidentified
  REGION 1..163: note = Description of Unknown: uncultivated organism
  REGION 1..163: note = MG4-250 HNH domain
EMKKPKWRRKQISKRNRENETGRKQAKEEIKRETQNPYPSPYDIRKLILYKECRGQCVYCGAQISRSNLFGDNSDSEVDHIIPFSRLQEDSFTHVVLCHARCNAEKGNRTPSEAFTGEEHERILDRVSRFDNDEATRKAKLRHFTLAGEELANYLNDFSSRQL

SEQ ID NO: 4285 - protein, 156 aa, unidentified
  REGION 1..156: note = Description of Unknown: uncultivated organism
  REGION 1..156: note = MG4-251 HNH domain
DLKSSNKERERRTFEIRKREKARAEIAERIAREAQIEKPSRNDILKVMLADECNFTCPYTGKNFSMKELLYGKDIQIEHIIPYSRSFDDSFRNKTLCFSSANAKKNNRTPFEAFSGAEYEEILQRVGKFKWPFAEDKKDLFKCEKVDSEEFLARNL

SEQ ID NO: 4286 - protein, 156 aa, unidentified
  REGION 1..156: note = Description of Unknown: uncultivated organism with predicted taxonomy: Bdellovibrio exovorus
  REGION 1..156: note = MG4-252 HNH domain
DLKNTNKEKERITKQNREKEKERVKIIQQIIKEVGIASPTRNDILKVQLAEECGFECPYTGKHFSMAQLFDGNTIQIEHIIPFSRSFDDSYRNKTLCMATENGRKNNRTPYEAYAKEEYKAILTRVSHFKGPFRESKLQIFETKEFSPDDFLQRNL

SEQ ID NO: 4287 - protein, 156 aa, unidentified; identical to SEQ ID NO: 4285
  REGION 1..156: note = Description of Unknown: uncultivated organism
  REGION 1..156: note = MG4-253 HNH domain

SEQ ID NO: 4288 - protein, 156 aa, unidentified
  REGION 1..156: note = Description of Unknown: uncultivated organism
  REGION 1..156: note = MG4-254 HNH domain
DLKSSAKERERRMWEMRQREKERTAIAGKIAEEAGIENPSRNDILKVMLAEECGYECPYTGKHFSMRDLLHGKDIHIEHIIPYSRSFDDSYRNKTLCLASANAAKNNRTPFEAFSGKEYQDILQRVARFRGPFAEAKLALFKLEKVEPEEFLERNL

SEQ ID NO: 4289 - protein, 156 aa, unidentified; identical to SEQ ID NO: 4285
  REGION 1..156: note = Description of Unknown: uncultivated organism
  REGION 1..156: note = MG4-255 HNH domain

SEQ ID NO: 4290 - protein, 156 aa, unidentified; identical to SEQ ID NO: 4285
  REGION 1..156: note = Description of Unknown: uncultivated organism
  REGION 1..156: note = MG4-256 HNH domain

SEQ ID NO: 4291 - protein, 161 aa, unidentified
  REGION 1..161: note = Description of Unknown: uncultivated organism with predicted taxonomy: Planctomycetes
  REGION 1..161: note = MG4-257 HNH domain
DIKRNREERQNINKKISERTKEREAARTRLQEDFNLADPKSSDIEKYLLWQESGPKCPYCGNPIAGEVLFSGATHIDHIIPRKVSLDNSFVNKVLCCSKCNNDKSDRTPHEAFNGDTQRWEKIAERVGAFRSEYRREKLRRVLMTKKEAQEFYTGFTDSQL

SEQ ID NO: 4292 - protein, 160 aa, unidentified
  REGION 1..160: note = Description of Unknown: uncultivated organism
  REGION 1..160: note = MG4-258 HNH domain
DLKRNAKQREMNWRRGRDRETVRTAAVKRILDEAHRPQPWKQDVDRVLLLEECRDLCVYCGQAISFQRLFDGDIDIDHILPRNRFPDDSFANRCLAHRACNQLKLGRTPYEAFGSDEELWPNIIARVKTWDNPDKLERFNLRDDGEFDPEREDSFAARRL

SEQ ID NO: 4293 - protein, 157 aa, unidentified
  REGION 1..157: note = Description of Unknown: uncultivated organism with predicted taxonomy: Acidobacteria
  REGION 1..157: note = MG4-259 HNH domain
ELRKSRKERENVTKRNRSRERERQQAKARILQECGLQNPSRADIEKALLFEECGGVCPYTGRTIEFSSLFRDSQFDVEHIIPLSRYPDDSFLNKTLCYHEENRSVKRGRTPWEAYGPDSERWDAILSRVQGFNNPAKLTRFKLRTEEELGEFTQRQM

SEQ ID NO: 4294 - protein, 161 aa, unidentified
  REGION 1..161: note = Description of Unknown: uncultivated organism with predicted taxonomy: Planctomycetes bacterium
  REGION 1..161: note = MG4-260 HNH domain
DLKKPRHERAEAITKNRNREKERVAAKTKLLQELGPGFEHPSRADVEKALLHEECGGVCPYTGRHIEFASLFGENPQFDVEHIIPFSRIPDDSFQNKTLCYHEENRLVKRNMTPFEVYKDPAQYEAILNRVRTWKKLNPGKQRRFELRTLEELEGFSARQL

SEQ ID NO: 4295 - protein, 157 aa, unidentified
  REGION 1..157: note = Description of Unknown: uncultivated organism
  REGION 1..157: note = MG4-261 HNH domain
DLKASNKEREQITKRNQQRERERNAIAERIIKETGLEKISRKDILKVMLADECDFTCPYSGKRFSMTELLNGGLVEVEHIIPFSRSFDDSFANKTLCVRELNAKKNNRTPFEAFGGSPQYSEMLTRVKYFKGHFAEHKLNLFKLAEIESSGFLERNL

SEQ ID NO: 4296 - protein, 154 aa, unidentified
  REGION 1..154: note = Description of Unknown: uncultivated organism with predicted taxonomy: Planctomycetes
  REGION 1..154: note = MG6-7 HNH domain
DVKGNAKEREELRIKMNRNEKENERARHELIHNMGITRPTRDDILKYKLWQECGRECPYTGRPISQQALFGEHPEFQIEHIIPYSRCLDDSFMNKTLCYVDENRRKGDQTPYEFYKNSDQYEHMLQRIRKLPYPKRQKFTQKEVSLDEFIKRQL

SEQ ID NO: 4297 - protein, 155 aa, unidentified
  REGION 1..155: note = Description of Unknown: uncultivated organism with predicted taxonomy: Planctomycetes bacterium
  REGION 1..155: note = MG6-8 HNH domain
DVKGSVKERDEIRVKQWKNEQENKRAEEELKLMGIRNPSFNDRLKYKLWEECGKECPYTGKPISQHQLFGEHPDIQIEHILPYSRTLDDSYMNKTLCYVNENRLKGNETPYEYYAENRVEQWEEILQRIKVLPYAKRRRFWQKEVVLDNFIQRQL

SEQ ID NO: 4298 - protein, 155 aa, unidentified
  REGION 1..155: note = Description of Unknown: uncultivated organism
  REGION 1..155: note = MG6-9 HNH domain
DVKGSLKEREEIQWKMRENEKRNEAARTRLIQDMDILNPSRDDVIKYKLWEECGKRCPYTGKVISLTDLFGSNPVFQVEHILPYSRSLDDSYMNKTLCCVNENRIKGNKTPYEFYSGDEEKYEQVKQQIKVLPWPKRRRFLQKEIKLDECIQREM

SEQ ID NO: 4299 - protein, 156 aa, unidentified
  REGION 1..156: note = Description of Unknown: uncultivated organism with predicted taxonomy: Planctomycetes bacterium
  REGION 1..156: note = MG6-10 HNH domain
DLKGSLRERKEIHFKQKENERENKRVRERLKNDFNHVSLNRDNIIKYKLWEECNGLCPYTGKKIPQYALFGENPEFQIEHILPYSRSLDDSYMNKTLCEVHENISVKGNQTPYEAYHHDEEKYEQIKQRIKVLPWPKRRKFLQKEIELDEAITREL

SEQ ID NO: 4300 - protein, 155 aa, unidentified; identical to SEQ ID NO: 4297
  REGION 1..155: note = Description of Unknown: uncultivated organism with predicted taxonomy: Planctomycetes bacterium
  REGION 1..155: note = MG6-11 HNH domain

SEQ ID NO: 4301 - protein, 155 aa, unidentified; identical to SEQ ID NO: 4298
  REGION 1..155: note = Description of Unknown: uncultivated organism
  REGION 1..155: note = MG6-12 HNH domain

SEQ ID NO: 4302 - protein, 156 aa, unidentified; identical to SEQ ID NO: 4299
  REGION 1..156: note = Description of Unknown: uncultivated organism with predicted taxonomy: Planctomycetes bacterium
  REGION 1..156: note = MG6-13 HNH domain

SEQ ID NO: 4303 - protein, 165 aa, unidentified
  REGION 1..165: note = Description of Unknown: uncultivated organism
  REGION 1..165: note = MG6-20 HNH domain
EIKGSLRQRAEIRDQQEASRKDREEIRTMLRDPIEFGKDNPSNDDILAYRLWEQQGHLSPYSGKTICQTDLRRFLNGEGVLEIDHILPYSKSWDNSQSNKCLCFSDENKNKKDFTPRQWLGDGTDAYTSMLQYVAGMKTTGMPFSKRRKFSQLEVDPEDCAKRQL

SEQ ID NO: 4304 - protein, 175 aa, unidentified
  REGION 1..175: note = Description of Unknown: uncultivated organism with predicted taxonomy: Arcicella aurantiaca
  REGION 1..175: note = MG7-2 HNH domain
ELKQNIKQRERTERNNNKRQKARKDVVKEILKTFPDMKEKDVTNRMIQKYELFQETNGICVYTGTEMKLGAVLSGQGFDIEHIIPKSRRFDDSFMNKTLADSSTNRDKNDLTAYDFMRKKGMTSFEKFTEIIHKLHKDKKISDTKLDNLLTTLNPVWIAEQEAKALSTDFINRQL

SEQ ID NO: 4305 - protein, 175 aa, unidentified
  REGION 1..175: note = Description of Unknown: uncultivated organism with predicted taxonomy: Flavobacteriales
  REGION 1..175: note = MG7-5 HNH domain
ELKQNIKQRERTESNNNKRQKARKDVVKEILKTFPDMKEKEVTQRMIQKYELFQETNGICVYTGTEMKLGAVLAGQGYDIEHIIPKSRRFDDSFMNKTLADSSTNRDKNDLTAYDFMRNKGMTAFEKFTEIIHTLHKNKKISDAKLDNLLTTLNPVWIAEKEAKELSTDFISRQL

SEQ ID NO: 4306 - protein, 175 aa, unidentified
  REGION 1..175: note = Description of Unknown: uncultivated organism with predicted taxonomy: Arcicella aurantiaca
  REGION 1..175: note = MG7-6 HNH domain
ELKQNIKQRERTESNNNKRQKARKDVVKEILKTFPDMKEKEVTQRMIQKYELFQETNGICIYTGTEMKLGAVLSGQGYDIEHIIPKSRRFDDSFMNKTLADSSTNRDKNDLTAYDFMRNKGTTAFEKFTEIIHKLHKDKKISDTKLDNLLTTLNPVWIAEQEAKALSTDFISRQL

SEQ ID NO: 4307 - protein, 167 aa, unidentified
  REGION 1..167: note = Description of Unknown: uncultivated organism
  REGION 1..167: note = MG7-9 HNH domain
ELKQSAQERKKTHELNQKRRRENERIKKDIADHLAIPPEKVTRAQIEKYRFYKEIDGISLYTGKRFSLADVLNGDTVDVEHIIPRTLRFDDSYHNKTLCERNINQEKGNMTACDYMRSRGAQEYEAYLERVKAFYEKNGREVRLKYKNLTTTQEDLLKDNEFLQRQL

SEQ ID NO: 4308 - protein, 169 aa, unidentified
  REGION 1..169: note = Description of Unknown: uncultivated organism with predicted taxonomy: Bacteroidetes
  REGION 1..169: note = MG7-10 HNH domain
ELKQSAQERQQIEKLINKNKKTNEEARKKIAEILGIDPQAVSRTMIEKWKLYEETDGLSLYSGKKIDLPTLLRGNAVDIDHIIPRVSRFDDSFQNKIFCEASLNQAKSNSTAHDFMRDQPVSGLQPYDDYRKMVKDLYEGKKISKAKYDNLMMTAEDLLKDGEFLQRQL

SEQ ID NO: 4309 - protein, 163 aa, unidentified
  REGION 1..163: note = Description of Unknown: uncultivated organism with predicted taxonomy: Bacteroidetes
  REGION 1..163: note = MG7-11 HNH domain
ELKQNAEERNKTFSRNKKEDAKHKDIIHRLMTECNFKKVSRRDIERYKLWEEFGYVSPYEPSKPISLSELFSGAYEVEHIIPKSRLFDDSFANKTICPRPINAAKDNQTAFDYMSGLGQQKLDEFTDFIQKHKTKKDGISQTKAKYLLCKGSEIPQDFINRQM

SEQ ID NO: 4310 - protein, 169 aa, unidentified
  REGION 1..169: note = Description of Unknown: uncultivated organism with predicted taxonomy: Bacteroidetes
  REGION 1..169: note = MG7-12 HNH domain
ELKQSAQERQQIEKLINKNKKTNEEARKKIAEILGIDPQAVSRTMIEKWKLYEETDGLSLYSGKKIDLPTLLRGNAVDIDHIIPRVSRFDDSFQNKIFCEASLNQAKSNSTAHDFMRDQPVSGLQPYDDYRKMVKDLYEGKKISKAKYDNLMMTAEDLLKDEEFLQRQL

SEQ ID NO: 4311 - protein, 153 aa, unidentified
  REGION 1..153: note = Description of Unknown: uncultivated organism with predicted taxonomy: Deltaproteobacteria bacterium
  REGION 1..153: note = MG7-13 HNH domain
ELKQTAKQRQKTSKQIRAREQQREAARNRLIEEGILTRPSRADIDRYLIWLEGNQMCPYTFKPIPISDLFNGRCDVDHIIPRSRLFDDSQLNKVVCYAAANREKGNRTAYEYMEQKGELEKFREHVMNTNYPFPKKKRLLSPEVPEDFIQRQL

SEQ ID NO: 4312 - protein, 153 aa, unidentified
  REGION 1..153: note = Description of Unknown: uncultivated organism with predicted taxonomy: Deltaproteobacteria bacterium
  REGION 1..153: note = MG7-14 HNH domain
ELKQTAKQRQKTSKQIRAREQQREAARNRLIEEGILTRPSRADIDRYLIWLEGNQMCPYTFKPIPISDLFNGRCDVDHIIPRSRLFDDSQLNKVVCYAAANKEKGNRTAYEYMEQKGELEKFREHVMNTNYPFPKKKRLLSPEVPEDFIQRQL

SEQ ID NO: 4313 - protein, 163 aa, unidentified
  REGION 1..163: note = Description of Unknown: uncultivated organism with predicted taxonomy: Collinsella
  REGION 1..163: note = MG14-1 HNH domain
ELRLPQRAKDEIAKANKKNEKNRERIAGQIAELRGCTADEVTGKQIEKYRLWEEQEYFDLYTGAKIEVDRLISDDTYTQIDHILPFSRTGENSRNNKVLVLAKSNQDKREQTPYEWMSHDGAPSWDAFERRVQENQKLSRRKKNFLLEKDLDTKEGEFLARSF

SEQ ID NO: 4314 - protein, 172 aa, unidentified
  REGION 1..172: note = Description of Unknown: uncultivated organism
  REGION 1..172: note = MG14-3 HNH domain
ELKHSAHEKRLINASKNKNEKVNAKARQDLIDYYHLPSDAHIKTGDFRKVKLYNEQGGKDPYTGEGIDFARMLAQSDYTEIDHILPISRSCDDSQSNKVLVLTKSNRDKSNRTPYEWMTSGESTAPDFAEFSARMQLWAENCELKRLASSKLKKLLNKDFTDKTQDFIARQL

SEQ ID NO: 4315 - protein, 165 aa, unidentified
  REGION 1..165: note = Description of Unknown: uncultivated organism with predicted taxonomy: Coriobacteriales
  REGION 1..165: note = MG14-4 HNH domain
ELRLPQCAKDDIAKANKKNEKNRERIAGQIAELRGCSVEEVTGKQIEKYRLWEEQECFDLYTGDSIDVMRLIQDDSYTQIDHILPFSRTGENSKNNKVLVLAKSNQDKREQTPYEWMHSGKPSAPSWSDFERRVQENQKLSRRKKNFLLEKDLDSKEGEFLARSF

SEQ ID NO: 4316 - protein, 165 aa, unidentified; identical to SEQ ID NO: 4315
  REGION 1..165: note = Description of Unknown: uncultivated organism with predicted taxonomy: Actinobacteria
  REGION 1..165: note = MG14-5 HNH domain

SEQ ID NO: 4317 - protein, 172 aa, unidentified
  REGION 1..172: note = Description of Unknown: uncultivated organism with predicted taxonomy: Collinsella
  REGION 1..172: note = MG14-6 HNH domain
ELKHSAHEKRLINASKNKNEKINAKARQDLIDYYHLPSDAHIKTGDFRKVKLYNEQGGKDAYTGEGIDFARMLAQSDYTEIDHILPISRSCDDSQSNKVLVLTKSNRDKSNRTPYEWMTSGESTAPDFAEFSARMQLWAENCELKRLASSKLKKLLNKDFTDKTQDFIARQL

SEQ ID NO: 4318 - protein, 163 aa, unidentified
  REGION 1..163: note = Description of Unknown: uncultivated organism with predicted taxonomy: Collinsella
  REGION 1..163: note = MG14-7 HNH domain
ELRLPQRAKDEIAKANKKNEKNRERIARQIAELRGCTADEVTGKQIEKYRLWEEQECFDLYTGAKIEVDRLISDGTYTQIDHILPFSRTGENSRNNKVLVLAKSNQDKREQTPYEWMSHDGAPSWDAFERRVQENQKLSRRKKNFLLEKDLGTKEGEFLARSF

SEQ ID NO: 4319 - protein, 165 aa, unidentified
  REGION 1..165: note = Description of Unknown: uncultivated organism with predicted taxonomy: Olsenella
  REGION 1..165: note = MG14-8 HNH domain
ELKMSNKEKSLVDKRNRENAANNKKWAATAAGILGCTPEEVPGRIIRKLILREEQGEKDLYTGEPIDLEHLVRDDRYCEIDHILPYSRTCDDGRANKVLVLSKSNQDKRERTPYEWMSSGEAGAPSWDSYRARVMAQVKNPRKRANYLNTDLGPETQAKFLARNL

SEQ ID NO: 4320 - protein, 165 aa, unidentified
  REGION 1..165: note = Description of Unknown: uncultivated organism with predicted taxonomy: Olsenella sp. KH3B4
  REGION 1..165: note = MG14-9 HNH domain
ELKMSNKEKSLVDKRNRENAAANKKWAEKAAGILGCTPEEVSGRVIRKLILREEQGEKDLYTGQPIDLERLVRDDRYCEIDHILPYSRTCDDSRTNKVLVLSKSNQDKRERTPYEWMTSGETGAPSWDEYHARIMATVKNPRKRANYLNTDLGPETQAKFLARNL

SEQ ID NO: 4321 - protein, 163 aa, unidentified
  REGION 1..163: note = Description of Unknown: uncultivated organism with predicted taxonomy: Collinsella
  REGION 1..163: note = MG14-10 HNH domain
ELRLPQRAKDDIAKAHKKNEKNRERIAGQIAELRGCSPEDVSGKLIEKYRLWEEQEYFDLYTGTKIEVDRLISDETYTQIDHILPFSRTGENSPSNKVLVLAKSNQDKREQTPFEWMSKEGAPSWDAFKRRVEENQKLGRRKKNFLLEEDLEAKEGEFLTRSF

SEQ ID NO: 4322 - protein, 172 aa, unidentified
  REGION 1..172: note = Description of Unknown: uncultivated organism with predicted taxonomy: Collinsella sp. AF20-14LB
  REGION 1..172: note = MG14-11 HNH domain
DLKHTKREKKLITSGNIYNRKVNEKAKDDIVEFLGLANADRVRGRDLEKVRLYNEQGGKDPYTGQGIDFGRMLTEKSYVEVDHVLPFSRSCDNSKTNKVLVLTKSNRDKANRTPYEWMTSGEPTAPNWDEFCIRMDVWASGKEPKHYYSSKLAKLKEDNFTNNIDSFISRNL

SEQ ID NO: 4323 - protein, 163 aa, unidentified
  REGION 1..163: note = Description of Unknown: uncultivated organism with predicted taxonomy: Collinsella
  REGION 1..163: note = MG14-12 HNH domain
ELRLPQRAKDEIAKANKKNEKNRERIAGQIAELRGCTTEEVTGKQIEKYRLWEEQECFDLYTGAKIEVDRLISDDTYTQIDHILPFSRTGENSRNNKVLVLAKSNQDKRGQTPYEWMSHDGAPSWDAFERRVQENQKLSRRKKNFLLEKDLDAKEGEFLARSF

SEQ ID NO: 4324 - protein, 163 aa, unidentified; identical to SEQ ID NO: 4323
  REGION 1..163: note = Description of Unknown: uncultivated organism with predicted taxonomy: Collinsella
  REGION 1..163: note = MG14-13 HNH domain

SEQ ID NO: 4325 - protein, 165 aa, unidentified
  REGION 1..165: note = Description of Unknown: uncultivated organism with predicted taxonomy: Olsenella
  REGION 1..165: note = MG14-14 HNH domain
ELKMSNKEKSLVDKRNRENAANNKKWAATAAGILGCTPEEVPGRIIRKLILREEQGEKDLYTGEPIDLEHLVRDDRYCEIDHILPYSRTCDDGRANKVLVLSKSNQDKRERTPYEWMTSGEAGAPSWDSYRARVMAQVKNPRKRANYLNTDLGPETQAKFLARNL

SEQ ID NO: 4326 - protein, 163 aa, unidentified; identical to SEQ ID NO: 4323
  REGION 1..163: note = Description of Unknown: uncultivated organism with predicted taxonomy: Coriobacteriales
  REGION 1..163: note = MG14-15 HNH domain

SEQ ID NO: 4327 - protein, 172 aa, unidentified
  REGION 1..172: note = Description of Unknown: uncultivated organism with predicted taxonomy: Eggerthellales
  REGION 1..172: note = MG14-16 HNH domain
ELKRSKHEREVVAESNRARRELNEQAKRDIVEFLGLPDDHHVRGRDLDMVKLYREQGGKDPYTGAGIDFRRMLEEHGYAEIDHILPISRTCDDSQANKVLCLTKSNRDKSNRSPYEWMTSGEAAAPDWDEFCGRMDRWAKMCEPRRYVRKKLANLTCENLAEHAEDFIKRNL

SEQ ID NO: 4328 - protein, 163 aa, unidentified; identical to SEQ ID NO: 4323
  REGION 1..163: note = Description of Unknown: uncultivated organism with predicted taxonomy: Collinsella
  REGION 1..163: note = MG14-17 HNH domain

SEQ ID NO: 4329 - protein, 165 aa, unidentified
  REGION 1..165: note = Description of Unknown: uncultivated organism with predicted taxonomy: Olsenella
  REGION 1..165: note = MG14-18 HNH domain
DLKMSNKEKKQVEKRNRENAANNKKWATTAAGILGCTPEEVPGRIIRKLILREEQGEKDLYTGDSIDLEHLVRDDRYCEIDHILPYSRTCDDSRANKVLVLSKSNQDKRERTPYEWMTSGEAGAPSWDSYRARVMAQVKNPRKRANYLNTDLGPETQAKFLARNL

SEQ ID NO: 4330 - protein, 163 aa, unidentified
  REGION 1..163: note = Description of Unknown: uncultivated organism with predicted taxonomy: Coriobacteriales
  REGION 1..163: note = MG14-19 HNH domain
ELRLPQRAKDEIAKANKKNEKNRERIAGQIAELRGCTTEEVTGKQIEKYRLWEEQECFDLYTGAKIEVDRLISDDTYTQIDHILPFSRTGENSRNNKVLVLAKSNQDKRGQTPYEWMSHDGAPSWDAFERRVQENQKLSRRKKNFLLEKNLDAKEGEFLARSF

SEQ ID NO: 4331 - protein, 163 aa, unidentified; identical to SEQ ID NO: 4323
  REGION 1..163: note = Description of Unknown: uncultivated organism with predicted taxonomy: Coriobacteriales
  REGION 1..163: note = MG14-20 HNH domain

SEQ ID NO: 4332 - protein, 165 aa, unidentified; identical to SEQ ID NO: 4325
  REGION 1..165: note = Description of Unknown: uncultivated organism with predicted taxonomy: Olsenella sp. KH3B4
  REGION 1..165: note = MG14-21 HNH domain

SEQ ID NO: 4333 - protein, 163 aa, unidentified; identical to SEQ ID NO: 4323
  REGION 1..163: note = Description of Unknown: uncultivated organism with predicted taxonomy: Collinsella
  REGION 1..163: note = MG14-22 HNH domain

SEQ ID NO: 4334 - protein, 163 aa, unidentified; identical to SEQ ID NO: 4323
  REGION 1..163: note = Description of Unknown: uncultivated organism with predicted taxonomy: Collinsella
  REGION 1..163: note = MG14-23 HNH domain

SEQ ID NO: 4335 - protein, 163 aa, unidentified
  REGION 1..163: note = Description of Unknown: uncultivated organism with predicted taxonomy: Collinsella
  REGION 1..163: note = MG14-24 HNH domain
ELRLPQRAKDDIAKAHKKNEKNRERIAGQIAELRGCNPEDVSGRLIEKYRLWEEQECFDLYTGAKIEVDRLISDETYTQIDHILPFSRTGENSPSNKVLVLAKSNQDKREQTPFEWMSKEGAPSWDAFKRRVEENQKLGRRKKNFLLEEDLEAKEGEFLTRSF

SEQ ID NO: 4336 - protein, 165 aa, unidentified
  REGION 1..165: note = Description of Unknown: uncultivated organism with predicted taxonomy: Olsenella
  REGION 1..165: note = MG14-25 HNH domain
ELKMSNKEKSLVDKRNRENAANNKKWAATAAGILGCTPEEVPGRIIRKLILREEQGEKDLYTGEPIDLEHLVRDDRYCEIDHILPYSRTCDDGRANKVLVLSKSNQDKRERTPYEWMTSGETSAPSWDSYRARVMAQVKNPRKRANYLNTDLGPETQAKFLARNL

SEQ ID NO: 4337 - protein, 163 aa, unidentified; identical to SEQ ID NO: 4323
  REGION 1..163: note = Description of Unknown: uncultivated organism with predicted taxonomy: Coriobacteriia
  REGION 1..163: note = MG14-26 HNH domain

SEQ ID NO: 4338 - protein, 163 aa, unidentified; identical to SEQ ID NO: 4323
  REGION 1..163: note = Description of Unknown: uncultivated organism with predicted taxonomy: Collinsella
  REGION 1..163: note = MG14-27 HNH domain

SEQ ID NO: 4339 - protein, 172 aa, unidentified
  REGION 1..172: note = Description of Unknown: uncultivated organism with predicted taxonomy: Collinsella
  REGION 1..172: note = MG14-28 HNH domain
ELKHTKHEKKLVDDGNKYNKREKEKAADDIVEYLGLSSADQVRGRDIDKVRLYNEQGGKDLYTGQGIDFGRMLTEKGYVEIDHILPYSRSCDNSRTNKVLVLTKSNRDKANRTPYEWMTSGEPTAPNWDEFCIRMDVWASGKEPKHYYSSKLAKLKEDNFTNNIDSFISRNL

SEQ ID NO: 4340 - protein, 163 aa, unidentified; identical to SEQ ID NO: 4323
  REGION 1..163: note = Description of Unknown: uncultivated organism with predicted taxonomy: Coriobacteriales
  REGION 1..163: note = MG14-29 HNH domain

SEQ ID NO: 4341 - protein, 163 aa, unidentified; identical to SEQ ID NO: 4330
  REGION 1..163: note = Description of Unknown: uncultivated organism with predicted taxonomy: Collinsella
  REGION 1..163: note = MG14-30 HNH domain

SEQ ID NO: 4342 - protein, 161 aa, unidentified
  REGION 1..161: note = Description of Unknown: uncultivated organism with predicted taxonomy: Coriobacteriia bacterium
  REGION 1..161: note = MG14-31 HNH domain
ELKQSAKEKDAILKSNNKTNKSREVLRKKLAEELSCDEDAIPFKLLEKIELWNQQDGRDLYVDEPIQYERLISDDSYCEIDHILPYSRTCDDSRMNKILVLQKSNQNKRESTPFEWMSATGDWDNFKLRILRLAHYPQKKKQRLLNTDLAEKQPEFIARNL

SEQ ID NO: 4343 - protein, 165 aa, unidentified
  REGION 1..165: note = Description of Unknown: uncultivated organism with predicted taxonomy: Olsenella sp. KH3B4
  REGION 1..165: note = MG14-32 HNH domain
DLKMSNKEKKQVEKRNRENAANNKKWATTAAGILGCTPEEVPGRIIRKLILREEQGEKDLYTGDSIDLEHLVRDDRYCEIDHILPYSRTCDDSRANKVLVLSKSNQDKRERTPYEWMTSGETSAPSWDSYRARVMAQVKNPRKRANYLNTDLGPETQAKFLARNL

SEQ ID NO: 4344 - protein, 163 aa, unidentified; identical to SEQ ID NO: 4323
  REGION 1..163: note = Description of Unknown: uncultivated organism with predicted taxonomy: Collinsella
  REGION 1..163: note = MG14-33 HNH domain

SEQ ID NO: 4345 - protein, 165 aa, unidentified
  REGION 1..165: note = Description of Unknown: uncultivated organism with predicted taxonomy: Olsenella
  REGION 1..165: note = MG14-34 HNH domain
DLKMSNKEKKQVEKRNRENAASNKKWATTAAGILGCTPEEVPGRIIRKLILREEQGEKDLYTGDSIDLEHLVRDDRYCEIGHILPYSRTCDDSRANKVLVLSKSNQDKRERTPYEWMTSGETSAPSWDSYRARVMAQVKNPRKRANYLNTDLGPETQAKFLARNL

SEQ ID NO: 4346 - protein, 167 aa, unidentified
  REGION 1..167: note = Description of Unknown: uncultivated organism with predicted taxonomy: Olsenella sp. KH3B4
  REGION 1..167: note = MG14-35 HNH domain
DLKMSKREKDAVSKRQRQNEATNKKWAKTAAGILGCEPEEVPGKVIRKLAMREEQGEKDAYTNAPIDLERLVREDHYCEIDHILPYSRTSEDSRANKVLVLSKSNQDKRERTPYEWMTQDVGKPGVPNWDEYHARVVATVKHPRKRANLLNTDLGPETEAKFLARNL

SEQ ID NO: 4347 - protein, 163 aa, unidentified
  REGION 1..163: note = Description of Unknown: uncultivated organism with predicted taxonomy: Coriobacteriales
  REGION 1..163: note = MG14-36 HNH domain
ELRLPQRAKDEIAKANKKNEKNRERIAGQIAELRGCTADEVTGKQIEKYRLWEEQECFDLYTGAKIEVDRLISDDTYTQIDHILPFSRTGENSRNNKVLVLAKSNQDKREQTPYEWMSHDGAPSWDAFERRVQENQKLSRRKKNFLLEKDLDTKEGEFLARSF

SEQ ID NO: 4348 - protein, 172 aa, unidentified
  REGION 1..172: note = Description of Unknown: uncultivated organism with predicted taxonomy: Coprococcus comes
  REGION 1..172: note = MG14-37 HNH domain
DLKRSKHEKAIIAATNKANKDSNEQAKKDLVAFYGLPNDAHVSSADFEKMWLYREQFGQDPYTGKGINLERMLNERDYVEIDHILPFSRSCDDSKSNKVLCLTKSNRDKANRTPYEWMTSGEPSAPDFGDFCRRMDAWAGKGKSAHYTKSKLSKLKNSTFGKEEQKFIDRNL

SEQ ID NO: 4349 - protein, 163 aa, unidentified
  REGION 1..163: note = Description of Unknown: uncultivated organism with predicted taxonomy: Coriobacteriia bacterium
  REGION 1..163: note = MG14-38 HNH domain
ELRLPQRAKDEIAKANKKNEKNRERIARQIAELRGCTADEVTGKQIEKYRLWEEQECFDLYTGAKIEVDRLISDDTYTQIDHILPFSRTGENSRSNKVLVLAKSNQDKREQTPYEWMSHDGAPSWDAFERRVQENQKLSRRKKNFLLEKDLDTKEGEFLARSF

SEQ ID NO: 4350 - protein, 163 aa, unidentified; identical to SEQ ID NO: 4347
  REGION 1..163: note = Description of Unknown: uncultivated organism with predicted taxonomy: Collinsella
  REGION 1..163: note = MG14-39 HNH domain

SEQ ID NO: 4351 - protein, 172 aa, unidentified
  REGION 1..172: note = Description of Unknown: uncultivated organism
  REGION 1..172: note = MG14-40 HNH domain
DLKRSKHEKAIIAATNKANKDSNEQVKKDLVAFYGLPNDAHVSSTDFEKMWLYREQFGQDPYTGKGINLERMLNDRDYVEIDHILPFSRSCDDSKSNKVLCLTKSNRDKANRTPYEWMTSGEPSAPDFGDFCGRMDAWAGKGKSAHYTKSKLSKLKNSTFGKEEQKFIDRNL

SEQ ID NO: 4352 - protein, 163 aa, unidentified
  REGION 1..163: note = Description of Unknown: uncultivated organism with predicted taxonomy: Collinsella
  REGION 1..163: note = MG14-41 HNH domain
ELRLPQRAKDEIAKANKKNEKNRERIAGQIAELRGCTADEVTGKQIEKYRLWEEQECFDLYTGAKIEVDRLISDDTYTQIDHILPFSRTGENSRNNKVLVLAKSNQDKREQTPYEWMSHDGAPSWDAFERRVQENQKLSRRKKNFLLEKDLDAKEGDFLARSF

SEQ ID NO: 4353 - protein, 163 aa, unidentified
  REGION 1..163: note = Description of Unknown: uncultivated organism with predicted taxonomy: Collinsella
  REGION 1..163: note = MG14-42 HNH domain
ELRLPQRAKDEIAKANKKNEKNRERIAGQIAELRGCTADEVTGKQIEKYRLWEEQECFDLYTGTKIEVDRLISDDTYTQIDHILPFSRTGENSRNNKVLVLAKSNQDKREQTPYEWMSHDGAPSWNAFERRVQENQKLSRRKKNFLLEKDLDTKEGEFLARSF

SEQ ID NO: 4354 - protein, 163 aa, unidentified
  REGION 1..163: note = Description of Unknown: uncultivated organism with predicted taxonomy: Collinsella
  REGION 1..163: note = MG14-43 HNH domain
ELRLPQRAKDEIAKANKKNEKNSERIAGQIAELRGCTADEVTGKQIEKYRLWEEQECFDLYTGAKIEVDRLISDDTYTQIDHILPFSRTGENSRNNKVLVLAKSNQDKREQTPYEWMSHDGAPSWDAFERRVQENQKLSRRKKNFLLEKDLDTKEGEFLARSF

SEQ ID NO: 4355 - protein, 163 aa, unidentified; identical to SEQ ID NO: 4352
  REGION 1..163: note = Description of Unknown: uncultivated organism with predicted taxonomy: Olsenella mediterranea
  REGION 1..163: note = MG14-44 HNH domain

SEQ ID NO: 4356 - protein, 163 aa, unidentified; identical to SEQ ID NO: 4352
  REGION 1..163: note = Description of Unknown: uncultivated organism with predicted taxonomy: Collinsella
  REGION 1..163: note = MG14-45 HNH domain

SEQ ID NO: 4357 - protein, 163 aa, unidentified; identical to SEQ ID NO: 4347
  REGION 1..163: note = Description of Unknown: uncultivated organism with predicted taxonomy: Collinsella
  REGION 1..163: note = MG14-46 HNH domain

SEQ ID NO: 4358 - protein, 172 aa, unidentified
  REGION 1..172: note = Description of Unknown: uncultivated organism with predicted taxonomy: Collinsella sp. AM13-34
  REGION 1..172: note = MG14-47 HNH domain
DLKRSKHEREIVAESNRARHELNEQAKRDIVEFLGLHDDDHVRGRDLDMVKLYREQGGKDPYTGTGIDFGRMLEERGYVEIDHILPISRTCDNSQANKVLCLTKSNRDKSNRSPYEWMTSGEATAPDWDEFCGRMERWAKMCEPRRYARKKLANLTCENLAERAGGFIDRNL

SEQ ID NO: 4359 - protein, 163 aa, unidentified; identical to SEQ ID NO: 4347
  REGION 1..163: note = Description of Unknown: uncultivated organism with predicted taxonomy: Collinsella
  REGION 1..163: note = MG14-48 HNH domain

SEQ ID NO: 4360 - protein, 172 aa, unidentified
  REGION 1..172: note = Description of Unknown: uncultivated organism with predicted taxonomy: Collinsella sp. AF20-14LB
  REGION 1..172: note = MG14-49 HNH domain
DLKRSKHEKAIIAATNKANKDSNEQAKKDLVAFYGLPNDAHVSSADFEKMWLYREQFGQDPYTGKGINLERMLNDRDYVEIDHILPFSRSCDDSKSNKVLCLTKSNRDKANRTPYEWMTSGEPSAPDFGDFCRRMDAWAGKGKSAHYTKSKLSKLKNSTFGKEEQKFIDRNL

SEQ ID NO: 4361 - protein, 165 aa, unidentified
  REGION 1..165: note = Description of Unknown: uncultivated organism with predicted taxonomy: Libanicoccus massiliensis
  REGION 1..165: note = MG14-50 HNH domain
ELKQSKREKDLATKRRNAREADNKRYAKLAADILGVEPEAVRGNIIRMLALREEQGCKDIYTGDRIDLERLVTDEHYCEIDHVLPYSRTCDDDQSNKTLTFASNNQNKRERTPYEWMTSDEEKAPNWEEYRNRVIAEVKNPRKRAKFLNTILDEDTQEGFINRNL

SEQ ID NO: 4362 - protein, 163 aa, unidentified
  REGION 1..163: note = Description of Unknown: uncultivated organism with predicted taxonomy: Collinsella
  REGION 1..163: note = MG14-51 HNH domain
ELRLPQRAKDEIAKANKKNEKNRERIAGQIAELRGCTADEVTGKQIEKYRLWEEQKCFDLYTGAKIEVDRLISDDTYTQIDHILPFSRTGENSRNNKVLVLAKSNQDKREQTPYEWMSHDGAPSWDAFERRVQENQKLSRRKKNFLLEKDLDTKEGEFLARSF

SEQ ID NO: 4363 - protein, 163 aa, unidentified
  REGION 1..163: note = Description of Unknown: uncultivated organism with predicted taxonomy: Collinsella
  REGION 1..163: note = MG14-52 HNH domain
ELRLPRRAKDEIAKANKKNEKNRERIARQIAELRGCTADEVTGKQIEKYRLWEEQECFDLYTGAKIEIGRLISDDTYTQIDHILPFSRTGENSRNNKVLVLAKSNQDKREQTPYEWMSHDGAPSWDAFERRVQENQKLSRRKKNFLLEKDLDTKEGEFLARSF

SEQ ID NO: 4364 - protein, 165 aa, unidentified
  REGION 1..165: note = Description of Unknown: uncultivated organism with predicted taxonomy: Olsenella sp. KH3B4
  REGION 1..165: note = MG14-53 HNH domain
DLKMSNKEKDLVDKRNRENEAAKKKWAKTAADILGIEPEEVPGRIVRKLIMREEQDNWDLYTGDAIDLERLVRDDRYCEIDHILPYSRTCDDSRANKVLVLSKSNQDKRERTPYEWMTSGEAGAPSWDEYRARVMALVKNPHKRANHLNTDLGEEAQAKFLARNL

SEQ ID NO: 4365 - protein, 165 aa, unidentified
  REGION 1..165: note = Description of Unknown: uncultivated organism with predicted taxonomy: Olsenella sp. KH3B4
  REGION 1..165: note = MG14-54 HNH domain
DLKMSNKEKSLVDKRNRENAASNKKWATTAAGILGCTPEEVPGRIIRKLILREEQGEKDLYTGDSIDLEHLVRDDRYCEIDHILPYSRTCDDSRANKTLVLSKSNQDKRERTPYEWMTSGEAGAPSWDSYRARVMAQVKNPRKRANYLNTDLGPETQAKFLARNL

SEQ ID NO: 4366 - protein, 172 aa, unidentified
  REGION 1..172: note = Description of Unknown: uncultivated organism with predicted taxonomy: Collinsella
  REGION 1..172: note = MG14-55 HNH domain
DLKRTEHERKLITSGNIYNRRTNEKAKDDIVEYLGLSDADQVRGRDIDKVRLYNEQGGKDPYTGQGIDFGRMLTEKGYVEIDHILPFSRSCDNARTNKVLVLTKSNRNKSNRTPYEWMTSGEPTAPNWDEFCIRMDVWASGKEPKHYYSSKLAKLKEDNFTNNIDSFISRNL

SEQ ID NO: 4367 - protein, 163 aa, unidentified
  REGION 1..163: note = Description of Unknown: uncultivated organism with predicted taxonomy: Collinsella
  REGION 1..163: note = MG14-56 HNH domain
ELRLPRRAKDEIAKANKKNEKNRERIARQIAELRGCTADEVTGKQIEKYRLWEEQECFDLYTGAKIEVGRLISDDTYTQIDHILPFSRTGENSRNNKVLVLAKSNQDKREQTPYEWMSHDGAPSWDAFERRVQENQKLGRRKKNFLLEKDLDTKEGEFLARSF

SEQ ID NO: 4368 - protein, 165 aa, unidentified
  REGION 1..165: note = Description of Unknown: uncultivated organism with predicted taxonomy: Olsenella
  REGION 1..165: note = MG14-57 HNH domain
DLKMSNKEKSLVDKRNRENAASNKKWATTAAGILGCTPEEVPGRIIRKLILREEQGEKDLYTGDSIDLEHLVRDDRYCEIDHILPYSRTCDDSRANKVLVLSKSNQDKRERTPYEWMTSGEAGAPSWDSYRARVIAQVKNPRKRANYLNTDLGPETQAKFLARNL

SEQ ID NO: 4369 - protein, 163 aa, unidentified; identical to SEQ ID NO: 4347
  REGION 1..163: note = Description of Unknown: uncultivated organism with predicted taxonomy: Collinsella
  REGION 1..163: note = MG14-58 HNH domain

SEQ ID NO: 4370 - protein, 163 aa, unidentified; identical to SEQ ID NO: 4349
  REGION 1..163: note = Description of Unknown: uncultivated organism with predicted taxonomy: Collinsella
  REGION 1..163: note = MG14-59 HNH domain

SEQ ID NO: 4371 - protein, 163 aa, unidentified; identical to SEQ ID NO: 4367
  REGION 1..163: note = Description of Unknown: uncultivated organism with predicted taxonomy: Collinsella
  REGION 1..163: note = MG14-60 HNH domain

SEQ ID NO: 4372 - protein, 163 aa, unidentified
  REGION 1..163: note = Description of Unknown: uncultivated organism with predicted taxonomy: Collinsella
  REGION 1..163: note = MG14-61 HNH domain
ELRLPQRAKDEIAKANKKNEKNRERIAGQIAELRGCTADEVTGKQIEKYRLWEEQECFDLYTGAKIEVDRLISDDTYTQIDHILPFSRTGENSRNNKVLVLAKSNQDKREQTPYEWMSHDGAPSWGAFERRVQENQKLSRRKKNFLLEKDLDTKEGEFLARSF

SEQ ID NO: 4373 - protein, 163 aa, unidentified; identical to SEQ ID NO: 4352
  REGION 1..163: note = Description of Unknown: uncultivated organism with predicted taxonomy: Collinsella
  REGION 1..163: note = MG14-62 HNH domain

SEQ ID NO: 4374 - protein, 172 aa, unidentified
  REGION 1..172: note = Description of Unknown: uncultivated organism with predicted taxonomy: Collinsella
  REGION 1..172: note = MG14-63 HNH domain
DLKRSKHEREIVAESNRARLELNEQAKRDIIEFLGLPDDHHVRGRDLALVKLYREQGGKDPYTGVGIDFRRMLEEHGYAEIDHILPVSRTCDDSQANKVLCLTKSNRDKSNRSPYEWMTSGEASAPDWNGFCGRMERWAKMCEPRRYARKKLANLTCENLAERAGNFIDRNL

SEQ ID NO: 4375 - protein, 163 aa, unidentified
  REGION 1..163: note = Description of Unknown: uncultivated organism with predicted taxonomy: Collinsella
  REGION 1..163: note = MG14-64 HNH domain
ELRLPQRAKDDIAKAHKRNEKNRERIAGQIAELRGCSPEDVSGRLIEKYRLWEEQECFDLYTGAKIEVDRLISDETYTQIDHILPFSRTGENSPSNKVLVLAKSNQDKREQTPFEWMSKEGAPSWDAFKRRVEENQKLGRRKKNFLLEENLEAKEGEFLARSF

SEQ ID NO: 4376 - protein, 163 aa, unidentified; identical to SEQ ID NO: 4367
  REGION 1..163: note = Description of Unknown: uncultivated organism with predicted taxonomy: Collinsella
  REGION 1..163: note = MG14-65 HNH domain

SEQ ID NO: 4377 - protein, 163 aa, unidentified; identical to SEQ ID NO: 4347
  REGION 1..163: note = Description of Unknown: uncultivated organism with predicted taxonomy: Collinsella
  REGION 1..163: note = MG14-66 HNH domain

SEQ ID NO: 4378 - protein, 163 aa, unidentified; identical to SEQ ID NO: 4347
  REGION 1..163: note = Description of Unknown: uncultivated organism with predicted taxonomy: Collinsella
  REGION 1..163: note = MG14-67 HNH domain

SEQ ID NO: 4379 - protein, 163 aa, unidentified; identical to SEQ ID NO: 4347
  REGION 1..163: note = Description of Unknown: uncultivated organism with predicted taxonomy: Collinsella
  REGION 1..163: note = MG14-68 HNH domain

SEQ ID NO: 4380 - protein, 167 aa, unidentified
  REGION 1..167: note = Description of Unknown: uncultivated organism with predicted taxonomy: Olsenella
  REGION 1..167: note = MG14-69 HNH domain
DLKRSKHEKDLINKRNRENERKNKQWRAQIAEEQGIDPDEVRPKLLRKIALWEEQDNFDIYTGHKIEFDRMISDDKYCEIDHVLPYSRTCDDSRNNKVLVLAKSNQDKRERTPYEWMTQDARKGAPNWDEYQARVIANHHISPRKRRYLLDNNLGPDQESDFLSRNL

SEQ ID NO: 4381 - protein, 165 aa, unidentified
  REGION 1..165: note = Description of Unknown: uncultivated organism with predicted taxonomy: Collinsella tanakaei
  REGION 1..165: note = MG14-70 HNH domain
ELRLPKKAKDEIAKAKKRNEKDRQRVAAQIAELLGCSADDVKGDYIEKYRLWEEQECFDIYSGEKIEVDRLIREETYTQIDHVLPFSRTGDNSRHNKVLVLARSNQLKREQTPYEWMTSNTEGAPSWDAFKRRVEENKKLSRRKKNFLLEEDLVSKEGEFQSRNM

SEQ ID NO: 4382 - protein, 163 aa, unidentified; identical to SEQ ID NO: 4347
  REGION 1..163: note = Description of Unknown: uncultivated organism with predicted taxonomy: Collinsella
  REGION 1..163: note = MG14-71 HNH domain

SEQ ID NO: 4383 - protein, 171 aa, unidentified
  REGION 1..171: note = Description of Unknown: uncultivated organism with predicted taxonomy: Atopobium sp. ICM42b
  REGION 1..171: note = MG14-72 HNH domain
DIAKSAKEKSKIAKGQNENRKENERIKDKIAEILHIDQSEVTGKQITKMKLYEEQGGKDIYTGEGLGDIAFAGGRRFLIDDNYCEIDHVLPYSRSADDLKSNKVLVLAKSNQEKGNRTPYEWMNSNDGSHPNWEQFCLRVLSNVRLSDGKKSKLLEENFAEKEVSFIKRNM

SEQ ID NO: 4384 - protein, 163 aa, unidentified
  REGION 1..163: note = Description of Unknown: uncultivated organism with predicted taxonomy: Collinsella
  REGION 1..163: note = MG14-73 HNH domain
ELRLPQRAKDEIAKANKKNEKNRERIAGQIAELRGCTADEVTGKQIEKYRLWEEQECFDLYTGAKIEVDRLISDDTYTQIDHILPFSRTGENSRNNKVLVLAKSNQDKREQTPYEWMSHDGAPSWDAFERRVQENQKLSRRKKNFLLEKDLDSKEGEFLARSF

SEQ ID NO: 4385 - protein, 172 aa, unidentified
  REGION 1..172: note = Description of Unknown: uncultivated organism with predicted taxonomy: Collinsella
  REGION 1..172: note = MG14-74 HNH domain
DLKRTEHEKKLITSGNIYNRRTNEKAKDDIVEYLGLSEADQVRGRDIDKVRLYNEQGGKDPYTGQGIDFGRMLTEKGYVEIDHILPFSRSCDNARTNKVLVLTKSNRDKSNRTPYEWMTSGEPTAPNWDEFCIRMDVWASGKEPKHYYSSKLAKLKEDNFTNNIDSFISRNL

SEQ ID NO: 4386 - protein, 172 aa, unidentified
  REGION 1..172: note = Description of Unknown: uncultivated organism with predicted taxonomy: Collinsella sp. AM13-34
  REGION 1..172: note = MG14-75 HNH domain
DLKRSKHEREIVAESNRARLELNEQAKRDIIEFLGLPDDHHVRGRDLALVKLYREQGGKDPYTGAGIDFRRMLEEHGYAEIDHILPVSRTCDDSQANKVLCLTKSNRDKSNRSPYEWMTSGEASAPDWGEFCGRMERWAKMCEPRRYARKKLANLTCENLTERAGNFIDRNL

SEQ ID NO: 4387 - protein, 163 aa, unidentified; identical to SEQ ID NO: 4347
  REGION 1..163: note = Description of Unknown: uncultivated organism with predicted taxonomy: Collinsella
  REGION 1..163: note = MG14-76 HNH domain

SEQ ID NO: 4388 - protein, 163 aa, unidentified
  REGION 1..163: note = Description of Unknown: uncultivated organism with predicted taxonomy: Collinsella
  REGION 1..163: note = MG14-77 HNH domain
ELRLPQRAKDEIAKTNKKNEKNRERIAGQIAELRGCTADEVTGKQIEKYRLWEEQECFDLYTGAKIEVDRLISDDTYTQIDHILPFSRTGENSRNNKVLVLAKSNQDKREQTPYEWMSHDGAPSWDAFERRVQENQKLSRRKKNFLLEKDLDTKEGEFLARSF

SEQ ID NO: 4389 - protein, 163 aa, unidentified
  REGION 1..163: note = Description of Unknown: uncultivated organism with predicted taxonomy: Collinsella
  REGION 1..163: note = MG14-78 HNH domain
ELRLPQRAKDEIAKANKKNEKNRERIAGQIAELRGCTADEVTGKQIEKYRLWEEQEYFDLYTGAKIEVDRLISDDTYTQIDHILPFSRTGENSRNNKVLVLAKSNQDKREQTPYEWMSHDGAPSWDAFVRRVQENQKLSRRKKNFLLEKDLDTKEGEFLARSF

SEQ ID NO: 4390 - protein, 163 aa, unidentified; identical to SEQ ID NO: 4347
  REGION 1..163: note = Description of Unknown: uncultivated organism with predicted taxonomy: Collinsella
  REGION 1..163: note = MG14-79 HNH domain

SEQ ID NO: 4391 - protein, 163 aa, unidentified; identical to SEQ ID NO: 4313
  REGION 1..163: note = Description of Unknown: uncultivated organism with predicted taxonomy: Coriobacteriales
  REGION 1..163: note = MG14-80 HNH domain

SEQ ID NO: 4392 - protein, 163 aa, unidentified; identical to SEQ ID NO: 4389
  REGION 1..163: note = Description of Unknown: uncultivated organism with predicted taxonomy: Collinsella
  REGION 1..163: note = MG14-82 HNH domain

SEQ ID NO: 4393 - protein, 163 aa, unidentified; identical to SEQ ID NO: 4321
  REGION 1..163: note = Description of Unknown: uncultivated organism with predicted taxonomy: Collinsella
  REGION 1..163: note = MG14-83 HNH domain

SEQ ID NO: 4394 - protein, 165 aa, unidentified; identical to SEQ ID NO: 4325
  REGION 1..165: note = Description of Unknown: uncultivated organism with predicted taxonomy: Olsenella
  REGION 1..165: note = MG14-84 HNH domain

SEQ ID NO: 4395 - protein, 163 aa, unidentified; identical to SEQ ID NO: 4347
  REGION 1..163: note = Description of Unknown: uncultivated organism with predicted taxonomy: Collinsella
  REGION 1..163: note = MG14-85 HNH domain

SEQ ID NO: 4396 - protein, 163 aa, unidentified; identical to SEQ ID NO: 4352
  REGION 1..163: note = Description of Unknown: uncultivated organism with predicted taxonomy: Collinsella
  REGION 1..163: note = MG14-87 HNH domain

SEQ ID NO: 4397 - protein, 163 aa, unidentified; identical to SEQ ID NO: 4352
  REGION 1..163: note = Description of Unknown: uncultivated organism with predicted taxonomy: Collinsella
  REGION 1..163: note = MG14-88 HNH domain

SEQ ID NO: 4398 - protein, 163 aa, unidentified; identical to SEQ ID NO: 4347
  REGION 1..163: note = Description of Unknown: uncultivated organism with predicted taxonomy: Collinsella
  REGION 1..163: note = MG14-89 HNH domain

SEQ ID NO: 4399 - protein, 163 aa, unidentified
  REGION 1..163: note = Description of Unknown: uncultivated organism with predicted taxonomy: Coriobacteriia
  REGION 1..163: note = MG14-90 HNH domain
ELRLPQRAKDEIAKANKKNEENRERIARQIAELRGCTADEVTGKQIEKYRLWEEQECFDLYTGAKIEVDRLISDDTYTQIDHILPFSRTGENSRNNKVLVLAKSNQDKREQTPYEWMSHDGAPSWDAFERRVQENQKLSRRKKNFLLEKDLDTKEGEFLARSF

SEQ ID NO: 4400 - protein, 165 aa, unidentified; identical to SEQ ID NO: 4381
  REGION 1..165: note = Description of Unknown: uncultivated organism with predicted taxonomy: Collinsella tanakaei
  REGION 1..165: note = MG14-91 HNH domain

SEQ ID NO: 4401 - protein, 163 aa, unidentified; identical to SEQ ID NO: 4352
  REGION 1..163: note = Description of Unknown: uncultivated organism with predicted taxonomy: Collinsella
  REGION 1..163: note = MG14-92 HNH domain

SEQ ID NO: 4402 - protein, 163 aa, unidentified; identical to SEQ ID NO: 4352
  REGION 1..163: note = Description of Unknown: uncultivated organism with predicted taxonomy: Collinsella
  REGION 1..163: note = MG14-93 HNH domain

SEQ ID NO: 4403 - protein, 163 aa, unidentified; identical to SEQ ID NO: 4347
  REGION 1..163: note = Description of Unknown: uncultivated organism with predicted taxonomy: Collinsella
  REGION 1..163: note = MG14-94 HNH domain

SEQ ID NO: 4404 - protein, 172 aa, unidentified
  REGION 1..172: note = Description of Unknown: uncultivated organism with predicted taxonomy: Collinsella
  REGION 1..172: note = MG14-95 HNH domain
DLKRSKHEREIVAESNRARLELNEQAKRDIIEFLGLPDDHHVRGRDLALVKLYREQGGKDPYTGAGIDFRRMLEEHGYAEIDHILPVSRTCDDSQANKALCLTKSNRDKSNRSPYEWMTSGEASAPDWGEFCGRMERWAKMCETRRYARKKLANLTCENLAERAGNFIDRNL

SEQ ID NO: 4405 - protein, 163 aa, unidentified; identical to SEQ ID NO: 4347
  REGION 1..163: note = Description of Unknown: uncultivated organism with predicted taxonomy: Collinsella
  REGION 1..163: note = MG14-96 HNH domain

SEQ ID NO: 4406 - protein, 163 aa, unidentified; identical to SEQ ID NO: 4347
  REGION 1..163: note = Description of Unknown: uncultivated organism with predicted taxonomy: Collinsella
  REGION 1..163: note = MG14-97 HNH domain

SEQ ID NO: 4407 - protein, 163 aa, unidentified
  REGION 1..163: note = Description of Unknown: uncultivated organism with predicted taxonomy: Collinsella
  REGION 1..163: note = MG14-98 HNH domain
ELRLPQRAKDEIAKANKKNEKNRERIAGQIAELRGCTADEVTGKQIEKYRLWEEQECFDLYTGAKIEVDRLISDDTYTQIDHILPFSRTGENSRNNKVLVLAKSNQDKREQTPYEWMSHDDAPSWDAFERRVQENQKLSRRKKNFLLEKDLDTKEGEFLARSF

SEQ ID NO: 4408 - protein, 165 aa, unidentified; identical to SEQ ID NO: 4320
  REGION 1..165: note = Description of Unknown: uncultivated organism with predicted taxonomy: Olsenella
  REGION 1..165: note = MG14-99 HNH domain

SEQ ID NO: 4409 - protein, 163 aa, unidentified; identical to SEQ ID NO: 4347
  REGION 1..163: note = Description of Unknown: uncultivated organism with predicted taxonomy: Collinsella
  REGION 1..163: note = MG14-100 HNH domain

SEQ ID NO: 4410 - protein, 172 aa, unidentified; identical to SEQ ID NO: 4358
  REGION 1..172: note = Description of Unknown: uncultivated organism with predicted taxonomy: Eggerthella sp. AM16-19
  REGION 1..172: note = MG14-101 HNH domain

SEQ ID NO: 4411 - protein, 165 aa, unidentified; identical to SEQ ID NO: 4365
  REGION 1..165: note = Description of Unknown: uncultivated organism with predicted taxonomy: Olsenella sp. KH3B4
  REGION 1..165: note = MG14-102 HNH domain

SEQ ID NO: 4412 - protein, 163 aa, unidentified
  REGION 1..163: note = Description of Unknown: uncultivated organism with predicted taxonomy: Collinsella
  REGION 1..163: note = MG14-103 HNH domain
ELRLPQRAKDEIAKANKKNEKNRERIAGQIAELRGCTADEVTGKQIEKYRLWEEQEYFDLYTGAKIEVDRLISDDTYTQIDHILPFSRTGENSRNNKVLVLAKSNQDKREQTPYEWMSHDGAPSWDAFERRVQENQKLSRRKKNFLLEKDLDAKEGDFLARSF

SEQ ID NO: 4413 - protein, 163 aa, unidentified
  REGION 1..163: note = Description of Unknown: uncultivated organism with predicted taxonomy: Collinsella
  REGION 1..163: note = MG14-104 HNH domain
ELRLPQRAKDEIAKANKKNEKNRERIAGQIAELRGCTADEVTGKQIEKYRLWEEQECFDLYTGAKIEVDRLISDDTYTQIDHILPFSRTGENSRNNKVLVLAKSNQDKREQTPYEWMSHDGAPSWDTFERRVQENQKLSRRKKNFLLEKDLDAKEGDFLARSF

SEQ ID NO: 4414 - protein, 163 aa, unidentified; identical to SEQ ID NO: 4330
  REGION 1..163: note = Description of Unknown: uncultivated organism with predicted taxonomy: Collinsella
  REGION 1..163: note = MG14-105 HNH domain

SEQ ID NO: 4415 - protein, 163 aa, unidentified; identical to SEQ ID NO: 4363
  REGION 1..163: note = Description of Unknown: uncultivated organism with predicted taxonomy: Collinsella
  REGION 1..163: note = MG14-106 HNH domain

SEQ ID NO: 4416 - protein, 163 aa, unidentified; identical to SEQ ID NO: 4313
  REGION 1..163: note = Description of Unknown: uncultivated organism with predicted taxonomy: Collinsella
  REGION 1..163: note = MG14-107 HNH domain

SEQ ID NO: 4417 - protein, 171 aa, unidentified
  REGION 1..171: note = Description of Unknown: uncultivated organism with predicted taxonomy: Atopobium sp. ICM42b
  REGION 1..171: note = MG14-108 HNH domain
DIAKSAKEKSKIAKGQNENRKENERIKDKIAKLLHIDQSEVTGKQITKMKLYEEQGGKDIYTGESLGDIAFAGGRRFLIDDNYCEIDHVLPYSRSADDLKSNKVLVLAKSNQEKGNRTPYEWMNSNDGNHPNWEQFCLRVTSNVRLSDSKKSKLLEENFAEKETSFIKRNM

SEQ ID NO: 4418 - protein, 171 aa, unidentified
  REGION 1..171: note = Description of Unknown: uncultivated organism with predicted taxonomy: Atopobium sp. ICM42b
  REGION 1..171: note = MG14-109 HNH domain
ELTKSPKQREKIAKEQNKNRKENERIRKEIAKYLEIDSSCVTKKQILKKKLYEEQKGLDVYTGESLEPSLHADDLTYLKDDSYCQIDHILPYSRSADDSIANKVLVLAKSNQDKGNRTPYEWMTSGHEHHLSWEEFAIRVSTNLSISDSKKWRLLEEDFNKKEVQFMNRNL

SEQ ID NO: 4419 - protein, 163 aa, unidentified; identical to SEQ ID NO: 4352
  REGION 1..163: note = Description of Unknown: uncultivated organism with predicted taxonomy: Collinsella
  REGION 1..163: note = MG14-110 HNH domain

SEQ ID NO: 4420 - protein, 172 aa, unidentified
  REGION 1..172: note = Description of Unknown: uncultivated organism
  REGION 1..172: note = MG14-111 HNH domain
DLKRSKHEKAIIAATNKANKDSNEQAKKDLVAFYGLPNDAHVSSADFEKMWLYREQFGQDPYTGKGINLERMLNDRDYVEIDHILPFSRSCDDSKSNKVLCLTKSNRDKANRTPYEWMTSGEPSAPDFGDFCRRMDAWAGKGKSAHYTKSKLSKLKNSTFGEEEQKFIDRNL

SEQ ID NO: 4421 - protein, 163 aa, unidentified
  REGION 1..163: note = Description of Unknown: uncultivated organism with predicted taxonomy: Collinsella
  REGION 1..163: note = MG14-112 HNH domain
ELRLPQRAKDEIAKANKKNEKNRERIAGQIAELRGCTADEVTGKQIEKYRLWEEQECFDLYTGAKIEVDRLISDDTYTQIDHILPFSRTGENSRNNKVLVLAKSNQDKREQTPYEWMSHDGAPSWDAFVRRVQENQKLSRRKKNFLLEKDLDTKEGEFLARSF

SEQ ID NO: 4422 - protein, 163 aa, unidentified; identical to SEQ ID NO: 4347
  REGION 1..163: note = Description of Unknown: uncultivated organism with predicted taxonomy: Collinsella
  REGION 1..163: note = MG14-113 HNH domain

SEQ ID NO: 4423 - protein, 163 aa, unidentified; identical to SEQ ID NO: 4347
  REGION 1..163: note = Description of Unknown: uncultivated organism with predicted taxonomy: Collinsella
  REGION 1..163: note = MG14-114 HNH domain

SEQ ID NO: 4424 - protein, 163 aa, unidentified; identical to SEQ ID NO: 4347
  REGION 1..163: note = Description of Unknown: uncultivated organism with predicted taxonomy: Collinsella
  REGION 1..163: note = MG14-115 HNH domain

SEQ ID NO: 4425 - protein, 163 aa, unidentified
  REGION 1..163: note = Description of Unknown: uncultivated organism with predicted taxonomy: Collinsella
  REGION 1..163: note = MG14-116 HNH domain
ELRLPQRAKDEIAKANKKNEKNRERIAGQIAELRGCAADEVTGKQIEKYRLWEEQEYFDLYTGAKIEVDRLISDDTYTQIDHILPFSRTGENSRNNKVLVLAKSNQDKREQTPYEWMSHDGAPSWDAFERRVQENQKLSRRKKNFLLEKDLDTKEGEFLARSF

SEQ ID NO: 4426 - protein, 163 aa, unidentified; identical to SEQ ID NO: 4347
  REGION 1..163: note = Description of Unknown: uncultivated organism with predicted taxonomy: Collinsella
  REGION 1..163: note = MG14-117 HNH domain

SEQ ID NO: 4427 - protein, 165 aa, unidentified
  REGION 1..165: note = Description of Unknown: uncultivated organism with predicted taxonomy: Olsenella sp. KCTC 15699
  REGION 1..165: note = MG14-118 HNH domain
DLKMSNKEKSLVDKRNRENAASNKKWATTAAGILGCTPEEVPGRIIRKLILREEQGEKDLYTGDSIDLEHLVRDDRYCEIDHILPYSRTCDDSRANKVLVLSKSNQDKRERTPYEWMTSGETSAPSWDSYRARVMAQVKNPRKRANYLNTDLGPETQAKFLARNL

SEQ ID NO: 4428 - protein, 163 aa, unidentified; identical to SEQ ID NO: 4347
  REGION 1..163: note = Description of Unknown: uncultivated organism with predicted taxonomy: Collinsella
  REGION 1..163: note = MG14-119 HNH domain

SEQ ID NO: 4429 - protein, 165 aa, unidentified; identical to SEQ ID NO: 4381
  REGION 1..165: note = Description of Unknown: uncultivated organism with predicted taxonomy: Collinsella tanakaei
  REGION 1..165: note = MG14-120 HNH domain

SEQ ID NO: 4430 - protein, 163 aa, unidentified
  REGION 1..163: note = Description of Unknown: uncultivated organism with predicted taxonomy: Collinsella
  REGION 1..163: note = MG14-121 HNH domain
ELRLPQRAKDEIAKANKKNKKNRERIAGQIAELRGCTIDEVTGKQIEKYRLWEEQECFDLYTGAKIEVDRLISDDTYTQIDHILPFSRTGENSRNNKVLVLAKSNQDKREQTPYEWMSHDGAPSWGAFERRVQENQKLSRRKKNFLLEKDLDTKEGEFLARSF

SEQ ID NO: 4431 - protein, 165 aa, unidentified
  REGION 1..165: note = Description of Unknown: uncultivated organism with predicted taxonomy: Olsenella
  REGION 1..165: note = MG14-122 HNH domain
DLKMSNKEKSLVDKRNRENAASNKKWATTAAGILGCTPEEVPGRIIRKLILREEQGEKDLYTGDSIDLEHLVRDDRYCEIDHILPYSRTCDDSRANKVLVLSKSNQDKRERTPYEWMTSGEAGAPSWDSYRARVMAQVKNPRKRANHLNTDLGPETQAKFLARNL

SEQ ID NO: 4432 - protein, 163 aa, unidentified; identical to SEQ ID NO: 4347
  REGION 1..163: note = Description of Unknown: uncultivated organism with predicted taxonomy: Olsenella mediterranea
  REGION 1..163: note = MG14-123 HNH domain

SEQ ID NO: 4433 - protein, 163 aa, unidentified; identical to SEQ ID NO: 4347
  REGION 1..163: note = Description of Unknown: uncultivated organism with predicted taxonomy: Collinsella
  REGION 1..163: note = MG14-124 HNH domain

SEQ ID NO: 4434 - protein, 163 aa, unidentified
  REGION 1..163: note = Description of Unknown: uncultivated organism with predicted taxonomy: Collinsella
  REGION 1..163: note = MG14-125 HNH domain
ELRLPQRAKVEIAKANKKNEKNRERIAGQIAELRGCTADEVTGKQIEKYRLWEEQECFDLYTGAKIEVDRLISDDTYTQIDHILPFSRTGENSRNNKVLVLAKSNQDKREQTPYEWMSHDGAPSWDAFERRVQENQKLSRRKKNFLLEKDLDTKEGEFLARSF

SEQ ID NO: 4435 - protein, 165 aa, unidentified
  REGION 1..165: note = Description of Unknown: uncultivated organism with predicted taxonomy: Libanicoccus massiliensis
  REGION 1..165: note = MG14-126 HNH domain
ELKQSKREKDLATKRRNAREADNKRYAKLAADILGVEPEAVRGNIIRMLALREEQGCKDIYTGDRIDLERLVTDEHYCEIDHVLPYSRTCDDDQSNKTLTFASNNQNKRERTPYEWMTSDEEKAPNWEEYRNRVIAEVKNPRKRAKFLNTLLDEDTQEGFINRNL

SEQ ID NO: 4436 - protein, 163 aa, unidentified; identical to SEQ ID NO: 4347
  REGION 1..163: note = Description of Unknown: uncultivated organism with predicted taxonomy: Collinsella
  REGION 1..163: note = MG14-127 HNH domain

SEQ ID NO: 4437 - protein, 163 aa, unidentified; identical to SEQ ID NO: 4352
  REGION 1..163: note = Description of Unknown: uncultivated organism with predicted taxonomy: Collinsella
  REGION 1..163: note = MG14-128 HNH domain

SEQ ID NO: 4438 - protein, 163 aa, unidentified; identical to SEQ ID NO: 4434
  REGION 1..163: note = Description of Unknown: uncultivated organism with predicted taxonomy: Collinsella
  REGION 1..163: note = MG14-129 HNH domain

SEQ ID NO: 4439 - protein, 165 aa, unidentified; identical to SEQ ID NO: 4336
  REGION 1..165: note = Description of Unknown: uncultivated organism with predicted taxonomy: Olsenella sp. KH3B4
  REGION 1..165: note = MG14-130 HNH domain

SEQ ID NO: 4440 - protein, 163 aa, unidentified; identical to SEQ ID NO: 4352
  REGION 1..163: note = Description of Unknown: uncultivated organism with predicted taxonomy: Collinsella
  REGION 1..163: note = MG14-131 HNH domain

SEQ ID NO: 4441 - protein, 163 aa, unidentified
  REGION 1..163: note = Description of Unknown: uncultivated organism with predicted taxonomy: Collinsella
  REGION 1..163: note = MG14-132 HNH domain
ELRLPQRAKDEIAKANKKNEKNRERIAGQIAELRGCTADEVTGKQIEKYRLWEEQECFDLYTGAKIEVDRLINDDTYTQIDHILPFSRTGENSRNNKVLVLAKSNQDKREQTPYEWMSHDGAPSWDAFERRVQENQKLSRRKKNFLLEKDLDTKEGEFLARSF

SEQ ID NO: 4442 - protein, 163 aa, unidentified; identical to SEQ ID NO: 4347
  REGION 1..163: note = Description of Unknown: uncultivated organism with predicted taxonomy: Collinsella
  REGION 1..163: note = MG14-133 HNH domain

SEQ ID NO: 4443 - protein, 163 aa, unidentified; identical to SEQ ID NO: 4347
  REGION 1..163: note = Description of Unknown: uncultivated organism with predicted taxonomy: Collinsella
  REGION 1..163: note = MG14-135 HNH domain

SEQ ID NO: 4444 - protein, 163 aa, unidentified; identical to SEQ ID NO: 4421
  REGION 1..163: note = Description of Unknown: uncultivated organism with predicted taxonomy: Collinsella
  REGION 1..163: note = MG14-136 HNH domain

SEQ ID NO: 4445 - protein, 172 aa, unidentified
  REGION 1..172: note = Description of Unknown: uncultivated organism with predicted taxonomy: Clostridiales
  REGION 1..172: note = MG14-137 HNH domain
DLKRSKREKAIIAATNKANKDSNEQAKKDLVAFYGLPNDAHVSSADFEKMWLYREQFGQDPYTGKGINLERMLNDRDYVEIDHILPFSRSCDDSKSNKVLCLTKSNRDKANRTPYEWMTSGEPSAPDFGDFCRRMDAWAGKGKSAHYTKSKLSKLKNSTFGEEEQKFIDRNL

SEQ ID NO: 4446 - protein, 163 aa, unidentified; identical to SEQ ID NO: 4313
  REGION 1..163: note = Description of Unknown: uncultivated organism with predicted taxonomy: Collinsella
  REGION 1..163: note = MG14-138 HNH domain

SEQ ID NO: 4447 - protein, 163 aa, unidentified; identical to SEQ ID NO: 4352
  REGION 1..163: note = Description of Unknown: uncultivated organism with predicted taxonomy: Collinsella
  REGION 1..163: note = MG14-139 HNH domain

SEQ ID NO: 4448 - protein, 163 aa, unidentified; identical to SEQ ID NO: 4313
  REGION 1..163: note = Description of Unknown: uncultivated organism with predicted taxonomy: Collinsella
  REGION 1..163: note = MG14-140 HNH domain

SEQ ID NO: 4449 - protein, 165 aa, unidentified; identical to SEQ ID NO: 4365
  REGION 1..165: note = Description of Unknown: uncultivated organism with predicted taxonomy: Olsenella sp. KH3B4
  REGION 1..165: note = MG14-141 HNH domain

SEQ ID NO: 4450 - protein, 163 aa, unidentified; identical to SEQ ID NO: 4352
  REGION 1..163: note = Description of Unknown: uncultivated organism with predicted taxonomy: Collinsella
  REGION 1..163: note = MG14-142 HNH domain

SEQ ID NO: 4451 - protein, 163 aa, unidentified; identical to SEQ ID NO: 4347
  REGION 1..163: note = Description of Unknown: uncultivated organism with predicted taxonomy: Collinsella
  REGION 1..163: note = MG14-143 HNH domain

SEQ ID NO: 4452 - protein, 172 aa, unidentified; identical to SEQ ID NO: 4358
  REGION 1..172: note = Description of Unknown: uncultivated organism with predicted taxonomy: Collinsella
  REGION 1..172: note = MG14-144 HNH domain

SEQ ID NO: 4453 - protein, 165 aa, unidentified; identical to SEQ ID NO: 4325
  REGION 1..165: note = Description of Unknown: uncultivated organism with predicted taxonomy: Olsenella sp. KCTC 15699
  REGION 1..165: note = MG14-145 HNH domain

SEQ ID NO: 4454 - protein, 165 aa, unidentified
  REGION 1..165: note = Description of Unknown: uncultivated organism with predicted taxonomy: Olsenella
  REGION 1..165: note = MG14-146 HNH domain
DLKMSNKEKSLVDKRNRENAASNKKWATTAAGILGCTPEEVPGRIIRKLILREEQGEKDLYTGDSIDLEHLVRDDRYCEIDHILPYSCTCDDSRANKVLVLSKSNQDKRERTPYEWMTSGEAGAPSWDSYRARVMAQVKNPRKRANYLNTDLGPETQAKFLARNL

SEQ ID NO: 4455 - protein, 167 aa, unidentified; identical to SEQ ID NO: 4346
  REGION 1..167: note = Description of Unknown: uncultivated organism with predicted taxonomy: Olsenella sp. KH3B4
  REGION 1..167: note = MG14-147 HNH domain

SEQ ID NO: 4456 - protein, 163 aa, unidentified; identical to SEQ ID NO: 4347
  REGION 1..163: note = Description of Unknown: uncultivated organism with predicted taxonomy: Olsenella mediterranea
  REGION 1..163: note = MG14-148 HNH domain

SEQ ID NO: 4457 - protein, 163 aa, unidentified; identical to SEQ ID NO: 4352
  REGION 1..163: note = Description of Unknown: uncultivated organism with predicted taxonomy: Collinsella
  REGION 1..163: note = MG14-149 HNH domain

SEQ ID NO: 4458 - protein, 163 aa, unidentified; identical to SEQ ID NO: 4347
  REGION 1..163: note = Description of Unknown: uncultivated organism with predicted taxonomy: Collinsella
  REGION 1..163: note = MG14-150 HNH domain

SEQ ID NO: 4459 - protein, 163 aa, unidentified; identical to SEQ ID NO: 4352
  REGION 1..163: note = Description of Unknown: uncultivated organism with predicted taxonomy: Collinsella
  REGION 1..163: note = MG14-151 HNH domain

SEQ ID NO: 4460 - protein, 163 aa, unidentified; identical to SEQ ID NO: 4323
  REGION 1..163: note = Description of Unknown: uncultivated organism with predicted taxonomy: Collinsella
  REGION 1..163: note = MG14-152 HNH domain

SEQ ID NO: 4461 - protein, 163 aa, unidentified; identical to SEQ ID NO: 4330
  REGION 1..163: note = Description of Unknown: uncultivated organism with predicted taxonomy: Coriobacteriales
  REGION 1..163: note = MG14-153 HNH domain

SEQ ID NO: 4462 - protein, 165 aa, unidentified; identical to SEQ ID NO: 4368
  REGION 1..165: note = Description of Unknown: uncultivated organism with predicted taxonomy: Olsenella
  REGION 1..165: note = MG14-154 HNH domain

SEQ ID NO: 4463 - protein, 165 aa, unidentified; identical to SEQ ID NO: 4345
  REGION 1..165: note = Description of Unknown: uncultivated organism with predicted taxonomy: Olsenella
  REGION 1..165: note = MG14-155 HNH domain

SEQ ID NO: 4464 - protein, 165 aa, unidentified; identical to SEQ ID NO: 4435
  REGION 1..165: note = Description of Unknown: uncultivated organism with predicted taxonomy: Libanicoccus massiliensis
  REGION 1..165: note = MG14-156 HNH domain

SEQ ID NO: 4465 - protein, 163 aa, unidentified; identical to SEQ ID NO: 4347
  REGION 1..163: note = Description of Unknown: uncultivated organism with predicted taxonomy: Collinsella
  REGION 1..163: note = MG14-157 HNH domain

SEQ ID NO: 4466 - protein, 163 aa, unidentified; identical to SEQ ID NO: 4323
  REGION 1..163: note = Description of Unknown: uncultivated organism with predicted taxonomy: Collinsella
  REGION 1..163: note = MG14-158 HNH domain

SEQ ID NO: 4467 - protein, 163 aa, unidentified; identical to SEQ ID NO: 4347
  REGION 1..163: note = Description of Unknown: uncultivated organism with predicted taxonomy: Collinsella
  REGION 1..163: note = MG14-159 HNH domain

SEQ ID NO: 4468 - protein, 163 aa, unidentified; identical to SEQ ID NO: 4367
  REGION 1..163: note = Description of Unknown: uncultivated organism with predicted taxonomy: Collinsella
  REGION 1..163: note = MG14-160 HNH domain

SEQ ID NO: 4469 - protein, 163 aa, unidentified; identical to SEQ ID NO: 4367
  REGION 1..163: note = Description of Unknown: uncultivated organism with predicted taxonomy: Collinsella
  REGION 1..163: note = MG14-161 HNH domain

SEQ ID NO: 4470 - protein, 165 aa, unidentified; identical to SEQ ID NO: 4336
  REGION 1..165: note = Description of Unknown: uncultivated organism with predicted taxonomy: Olsenella
  REGION 1..165: note = MG14-162 HNH domain

SEQ ID NO: 4471 - protein, 163 aa, unidentified; identical to SEQ ID NO: 4367
  REGION 1..163: note = Description of Unknown: uncultivated organism with predicted taxonomy: Collinsella
  REGION 1..163: note = MG14-163 HNH domain

SEQ ID NO: 4472 - protein, 165 aa, unidentified; identical to SEQ ID NO: 4319
  REGION 1..165: note = Description of Unknown: uncultivated organism with predicted taxonomy: Olsenella
  REGION 1..165: note = MG14-164 HNH domain

SEQ ID NO: 4473 - protein, 163 aa, unidentified; identical to SEQ ID NO: 4323
  REGION 1..163: note = Description of Unknown: uncultivated organism with predicted taxonomy: Collinsella
  REGION 1..163: note = MG14-165 HNH domain

SEQ ID NO: 4474 - protein, 163 aa, unidentified; identical to SEQ ID NO: 4347
  REGION 1..163: note = Description of Unknown: uncultivated organism with predicted taxonomy: Collinsella sp. AM17-1
  REGION 1..163: note = MG14-166 HNH domain

SEQ ID NO: 4475 - protein, 163 aa, unidentified; identical to SEQ ID NO: 4352
  REGION 1..163: note = Description of Unknown: uncultivated organism with predicted taxonomy: Collinsella
  REGION 1..163: note = MG14-167 HNH domain

SEQ ID NO: 4476 - protein, 165 aa, unidentified; identical to SEQ ID NO: 4329
  REGION 1..165: note = Description of Unknown: uncultivated organism with predicted taxonomy: Olsenella sp. KH3B4
  REGION 1..165: note = MG14-168 HNH domain

SEQ ID NO: 4477 - protein, 165 aa, unidentified; identical to SEQ ID NO: 4325
  REGION 1..165: note = Description of Unknown: uncultivated organism with predicted taxonomy: Olsenella
  REGION 1..165: note = MG14-169 HNH domain

SEQ ID NO: 4478 - protein, 165 aa, unidentified; identical to SEQ ID NO: 4343
  REGION 1..165: note = Description of Unknown: uncultivated organism with predicted taxonomy: Olsenella sp. KH3B4
  REGION 1..165: note = MG14-170 HNH domain

SEQ ID NO: 4479 - protein, 161 aa, unidentified; identical to SEQ ID NO: 4342
  REGION 1..161: note = Description of Unknown: uncultivated organism with predicted taxonomy: Coriobacteriia bacterium
  REGION 1..161: note = MG14-171 HNH domain

SEQ ID NO: 4480 - protein, 163 aa, unidentified; identical to SEQ ID NO: 4375
  REGION 1..163: note = Description of Unknown: uncultivated organism with predicted taxonomy: Collinsella
  REGION 1..163: note = MG14-172 HNH domain

SEQ ID NO: 4481 - protein, 163 aa, unidentified; identical to SEQ ID NO: 4384
  REGION 1..163: note = Description of Unknown: uncultivated organism with predicted taxonomy: Collinsella
  REGION 1..163: note = MG14-173 HNH domain

SEQ ID NO: 4482 - protein, 163 aa, unidentified
  REGION 1..163: note = Description of Unknown: uncultivated organism with predicted taxonomy: Collinsella
  REGION 1..163: note = MG14-174 HNH domain
ELRLPQRAKDEIAKANKKNEKNRERIARQIAELRGCTADEVTGKQIEKYRLWEEQECFDLYTGAKIEVDRLISDDTYTQIDHILPFSRTGENSRNNKVLVLAKSNQDKREQTPYEWMSHDGAPSWDAFERRVQENQKLSRRKKNFLLEKDLDTKEGEFLARSF

SEQ ID NO: 4483 - protein, 163 aa, unidentified; identical to SEQ ID NO: 4349
  REGION 1..163: note = Description of Unknown: uncultivated organism with predicted taxonomy: Collinsella
  REGION 1..163: note = MG14-175 HNH domain

SEQ ID NO: 4484 - protein, 163 aa, unidentified; identical to SEQ ID NO: 4349
  REGION 1..163: note = Description of Unknown: uncultivated organism with predicted taxonomy: Collinsella aerofaciens
  REGION 1..163: note = MG14-176 HNH domain

SEQ ID NO: 4485 - protein, 163 aa, unidentified; identical to SEQ ID NO: 4347
  REGION 1..163: note = Description of Unknown: uncultivated organism with predicted taxonomy: Collinsella
  REGION 1..163: note = MG14-177 HNH domain

SEQ ID NO: 4486 - protein, 165 aa, unidentified
  REGION 1..165: note = Description of Unknown: uncultivated organism with predicted taxonomy: Olsenella sp. GAM18
  REGION 1..165: note = MG14-178 HNH domain
DLKMSNKEKILVDKRNRENAASNKKWATTAAGILGCTPEEVPGRIIRKLILREEQGEKDLYTGDSIDLEHLVRDDRYCEIDHILPYSRTCDDSRANKVLVLSKSNQDKRERTPYEWMTSGEAGAPSWDSYRARVIAQVKNPRKRANYLNTDLGPETQAKFLARNL

SEQ ID NO: 4487 - protein, 163 aa, unidentified; identical to SEQ ID NO: 4353
  REGION 1..163: note = Description of Unknown: uncultivated organism with predicted taxonomy: Collinsella
  REGION 1..163: note = MG14-179 HNH domain

SEQ ID NO: 4488 - protein, 163 aa, unidentified; identical to SEQ ID NO: 4347
  REGION 1..163: note = Description of Unknown: uncultivated organism with predicted taxonomy: Collinsella
  REGION 1..163: note = MG14-180 HNH domain

SEQ ID NO: 4489 - protein, 167 aa, unidentified; identical to SEQ ID NO: 4380
  REGION 1..167: note = Description of Unknown: uncultivated organism with predicted taxonomy: Olsenella
  REGION 1..167: note = MG14-181 HNH domain

SEQ ID NO: 4490 - protein, 163 aa, unidentified; identical to SEQ ID NO: 4347
  REGION 1..163: note = Description of Unknown: uncultivated organism with predicted taxonomy: Olsenella mediterranea
  REGION 1..163: note = MG14-182 HNH domain

SEQ ID NO: 4491 - protein, 163 aa, unidentified; identical to SEQ ID NO: 4347
  REGION 1..163: note = Description of Unknown: uncultivated organism with predicted taxonomy: Collinsella
  REGION 1..163: note = MG14-183 HNH domain

SEQ ID NO: 4492 - protein, 165 aa, unidentified; identical to SEQ ID NO: 4431
  REGION 1..165: note = Description of Unknown: uncultivated organism with predicted taxonomy: Olsenella
  REGION 1..165: note = MG14-184 HNH domain

SEQ ID NO: 4493 - protein, 163 aa, unidentified; identical to SEQ ID NO: 4347
  REGION 1..163: note = Description of Unknown: uncultivated organism with predicted taxonomy: Collinsella
  REGION 1..163: note = MG14-185 HNH domain

SEQ ID NO: 4494 - protein, 163 aa, unidentified; identical to SEQ ID NO: 4347
  REGION 1..163: note = Description of Unknown: uncultivated organism with predicted taxonomy: Collinsella
  REGION 1..163: note = MG14-186 HNH domain

SEQ ID NO: 4495 - protein, 163 aa, unidentified; identical to SEQ ID NO: 4399
  REGION 1..163: note = Description of Unknown: uncultivated organism with predicted taxonomy: Coriobacteriales
  REGION 1..163: note = MG14-187 HNH domain

SEQ ID NO: 4496 - protein, 163 aa, unidentified; identical to SEQ ID NO: 4441
  REGION 1..163: note = Description of Unknown: uncultivated organism with predicted taxonomy: Collinsella
  REGION 1..163: note = MG14-188 HNH domain

SEQ ID NO: 4497 - protein, 163 aa, unidentified; identical to SEQ ID NO: 4352
  REGION 1..163: note = Description of Unknown: uncultivated organism with predicted taxonomy: Collinsella
  REGION 1..163: note = MG14-189 HNH domain

SEQ ID NO: 4498 - protein, 163 aa, unidentified; identical to SEQ ID NO: 4347
  REGION 1..163: note = Description of Unknown: uncultivated organism with predicted taxonomy: Collinsella
  REGION 1..163: note = MG14-190 HNH domain

SEQ ID NO: 4499 - protein, 163 aa, unidentified; identical to SEQ ID NO: 4352
  REGION 1..163: note = Description of Unknown: uncultivated organism with predicted taxonomy: Collinsella
  REGION 1..163: note = MG14-191 HNH domain

SEQ ID NO: 4500 - protein, 163 aa, unidentified; identical to SEQ ID NO: 4347
  REGION 1..163: note = Description of Unknown: uncultivated organism with predicted taxonomy: Collinsella
  REGION 1..163: note = MG14-192 HNH domain

SEQ ID NO: 4501 - protein, 163 aa, unidentified; identical to SEQ ID NO: 4412
  REGION 1..163: note = Description of Unknown: uncultivated organism with predicted taxonomy: Collinsella
  REGION 1..163: note = MG14-193 HNH domain

SEQ ID NO: 4502 - protein, 165 aa, unidentified; identical to SEQ ID NO: 4364
  REGION 1..165: note = Description of Unknown: uncultivated organism with predicted taxonomy: Olsenella
  REGION 1..165: note = MG14-194 HNH domain

SEQ ID NO: 4503 - protein, 163 aa, unidentified; identical to SEQ ID NO: 4349
  REGION 1..163: note = Description of Unknown: uncultivated organism with predicted taxonomy: Collinsella
  REGION 1..163: note = MG14-195 HNH domain

SEQ ID NO: 4504 - protein, 172 aa, unidentified; identical to SEQ ID NO: 4374
  REGION 1..172: note = Description of Unknown: uncultivated organism with predicted taxonomy: Collinsella
  REGION 1..172: note = MG14-196 HNH domain

SEQ ID NO: 4505 - protein, 163 aa, unidentified; identical to SEQ ID NO: 4347
  REGION 1..163: note = Description of Unknown: uncultivated organism with predicted taxonomy: Collinsella
  REGION 1..163: note = MG14-197 HNH domain

SEQ ID NO: 4506 - protein, 163 aa, unidentified; identical to SEQ ID NO: 4347
  REGION 1..163: note = Description of Unknown: uncultivated organism with predicted taxonomy: Collinsella
  REGION 1..163: note = MG14-198 HNH domain

SEQ ID NO: 4507 - protein, 163 aa, unidentified; identical to SEQ ID NO: 4347
  REGION 1..163: note = Description of Unknown: uncultivated organism with predicted taxonomy: Collinsella
  REGION 1..163: note = MG14-199 HNH domain

SEQ ID NO: 4508 - protein, 163 aa, unidentified; identical to SEQ ID NO: 4352
  REGION 1..163: note = Description of Unknown: uncultivated organism with predicted taxonomy: Collinsella
  REGION 1..163: note = MG14-200 HNH domain

SEQ ID NO: 4509 - protein, 163 aa, unidentified; identical to SEQ ID NO: 4313
  REGION 1..163: note = Description of Unknown: uncultivated organism with predicted taxonomy: Collinsella
  REGION 1..163: note = MG14-201 HNH domain

SEQ ID NO: 4510 - protein, 163 aa, unidentified; identical to SEQ ID NO: 4434
  REGION 1..163: note = Description of Unknown: uncultivated organism with predicted taxonomy: Collinsella
  REGION 1..163: note = MG14-202 HNH domain

SEQ ID NO: 4511 - protein, 163 aa, unidentified; identical to SEQ ID NO: 4434
  REGION 1..163: note = Description of Unknown: uncultivated organism with predicted taxonomy: Collinsella
  REGION 1..163: note = MG14-203 HNH domain

SEQ ID NO: 4512 - protein, 163 aa, unidentified; identical to SEQ ID NO: 4352
  REGION 1..163: note = Description of Unknown: uncultivated organism with predicted taxonomy: Collinsella
  REGION 1..163: note = MG14-204 HNH domain

SEQ ID NO: 4513 - protein, 163 aa, unidentified
  REGION 1..163: note = Description of Unknown: uncultivated organism with predicted taxonomy: Olsenella mediterranea
  REGION 1..163: note = MG14-205 HNH domain
ELRLPQRAKDEIAKANKKNEKNRERIAGQIAELRGCTADEVTGKQIEKYRLWEEQECFDLYTGAKIEVDRLISDDTYTQIDHILPFSRTGENSRNNKVLVLAKSNQDKREQTPYEWMSHDGAPSWDTFERRVQENQKLSRRKKNFLLEKDLDTKEGEFLARSF

SEQ ID NO: 4514 - protein, 163 aa, unidentified; identical to SEQ ID NO: 4347
  REGION 1..163: note = Description of Unknown: uncultivated organism with predicted taxonomy: Collinsella
  REGION 1..163: note = MG14-206 HNH domain

SEQ ID NO: 4515 - protein, 163 aa, unidentified; identical to SEQ ID NO: 4421
  REGION 1..163: note = Description of Unknown: uncultivated organism with predicted taxonomy: Collinsella
  REGION 1..163: note = MG14-207 HNH domain

SEQ ID NO: 4516 - protein, 165 aa, unidentified; identical to SEQ ID NO: 4365
  REGION 1..165: note = Description of Unknown: uncultivated organism with predicted taxonomy: Olsenella
  REGION 1..165: note = MG14-208 HNH domain

SEQ ID NO: 4517 - protein, 163 aa, unidentified; identical to SEQ ID NO: 4352
  REGION 1..163: note = Description of Unknown: uncultivated organism with predicted taxonomy: Collinsella
  REGION 1..163: note = MG14-209 HNH domain

SEQ ID NO: 4518 - protein, 163 aa, unidentified; identical to SEQ ID NO: 4389
  REGION 1..163: note = Description of Unknown: uncultivated organism with predicted taxonomy: Collinsella
  REGION 1..163: note = MG14-210 HNH domain

SEQ ID NO: 4519 - protein, 163 aa, unidentified; identical to SEQ ID NO: 4347
  REGION 1..163: note = Description of Unknown: uncultivated organism with predicted taxonomy: Collinsella
  REGION 1..163: note = MG14-211 HNH domain

SEQ ID NO: 4520 - protein, 172 aa, unidentified; identical to SEQ ID NO: 4404
  REGION 1..172: note = Description of Unknown: uncultivated organism with predicted taxonomy: Collinsella
  REGION 1..172: note = MG14-212 HNH domain

SEQ ID NO: 4521 - protein, 163 aa, unidentified; identical to SEQ ID NO: 4347
  REGION 1..163: note = Description of Unknown: uncultivated organism with predicted taxonomy: Collinsella
  REGION 1..163: note = MG14-213 HNH domain

SEQ ID NO: 4522 - protein, 163 aa, unidentified; identical to SEQ ID NO: 4347
  REGION 1..163: note = Description of Unknown: uncultivated organism with predicted taxonomy: Coriobacteriales
  REGION 1..163: note = MG14-214 HNH domain

SEQ ID NO: 4523 - protein, 167 aa, unidentified
  REGION 1..167: note = Description of Unknown: uncultivated organism with predicted taxonomy: Olsenella
  REGION 1..167: note = MG14-215 HNH domain
ELKQSKREKDAISKFQRKKEQANNRYREVAAGILNISPDEVSDRIIEKMAFREQQNDKDAYTGTTINLERLVTDSHYCQVDHVLPYSRTSDNSRNNRVLVLSTTNQNKRERTPFEWMNSGEANAPAWNDYKKHVLANKNYSQRKKQVYLLNENLDSETEAQFISRNL

SEQ ID NO: 4524 - protein, 163 aa, unidentified; identical to SEQ ID NO: 4347
  REGION 1..163: note = Description of Unknown: uncultivated organism with predicted taxonomy: Collinsella
  REGION 1..163: note = MG14-216 HNH domain

SEQ ID NO: 4525 - protein, 163 aa, unidentified; identical to SEQ ID NO: 4372
  REGION 1..163: note = Description of Unknown: uncultivated organism with predicted taxonomy: Collinsella
  REGION 1..163: note = MG14-217 HNH domain

SEQ ID NO: 4526 - protein, 163 aa, unidentified; identical to SEQ ID NO: 4347
  REGION 1..163: note = Description of Unknown: uncultivated organism with predicted taxonomy: Olsenella mediterranea
  REGION 1..163: note = MG14-218 HNH domain

SEQ ID NO: 4527 - protein, 163 aa, unidentified; identical to SEQ ID NO: 4352
  REGION 1..163: note = Description of Unknown: uncultivated organism with predicted taxonomy: Collinsella
  REGION 1..163: note = MG14-219 HNH domain

SEQ ID NO: 4528 - protein, 163 aa, unidentified; identical to SEQ ID NO: 4352
  REGION 1..163: note = Description of Unknown: uncultivated organism with predicted taxonomy: Collinsella
  REGION 1..163: note = MG14-220 HNH domain

SEQ ID NO: 4529 - protein, 163 aa, unidentified; identical to SEQ ID NO: 4347
  REGION 1..163: note = Description of Unknown: uncultivated organism with predicted taxonomy: Collinsella
  REGION 1..163: note = MG14-221 HNH domain

SEQ ID NO: 4530 - protein, 163 aa, unidentified; identical to SEQ ID NO: 4413
  REGION 1..163: note = Description of Unknown: uncultivated organism with predicted taxonomy: Collinsella
  REGION 1..163: note = MG14-222 HNH domain

SEQ ID NO: 4531 - protein, 172 aa, unidentified
  REGION 1..172: note = Description of Unknown: uncultivated organism with predicted taxonomy: Collinsella sp. AM13-34
  REGION 1..172: note = MG14-223 HNH domain
DLKRSKHEREIVAESNRARLELNEQAKRDIIEFLGLPDDHHVRGRDLALVKLYREQGGKDPYTGAAIDFRRMLEEHRYAEIDHILPVSRTCDDSQANKVLCLTKSNRDKSNRSPYEWMTSGEASAPDWGEFCGRMERWAKMCEPRRYARKKLANLTCENLAERAGNFIDRNL

SEQ ID NO: 4532 - protein, 163 aa, unidentified; identical to SEQ ID NO: 4347
  REGION 1..163: note = Description of Unknown: uncultivated organism with predicted taxonomy: Collinsella
  REGION 1..163: note = MG14-224 HNH domain

SEQ ID NO: 4533 - protein, 163 aa, unidentified; identical to SEQ ID NO: 4313
  REGION 1..163: note = Description of Unknown: uncultivated organism with predicted taxonomy: Collinsella
  REGION 1..163: note = MG14-225 HNH domain

SEQ ID NO: 4534 - protein, 163 aa, unidentified; identical to SEQ ID NO: 4313
  REGION 1..163: note = Description of Unknown: uncultivated organism with predicted taxonomy: Collinsella
  REGION 1..163: note = MG14-226 HNH domain

SEQ ID NO: 4535 - protein, 163 aa, unidentified; identical to SEQ ID NO: 4362
  REGION 1..163: note = Description of Unknown: uncultivated organism with predicted taxonomy: Collinsella
  REGION 1..163: note = MG14-227 HNH domain

SEQ ID NO: 4536 - protein, 165 aa, unidentified; identical to SEQ ID NO: 4381
  REGION 1..165: note = Description of Unknown: uncultivated organism with predicted taxonomy: Olsenella
  REGION 1..165: note = MG14-228 HNH domain

SEQ ID NO: 4537 - protein, 163 aa, unidentified; identical to SEQ ID NO: 4347
  REGION 1..163: note = Description of Unknown: uncultivated organism with predicted taxonomy: Olsenella
  REGION 1..163: note = MG14-229 HNH domain

SEQ ID NO: 4538 - protein, 163 aa, unidentified; identical to SEQ ID NO: 4347
  REGION 1..163: note = Description of Unknown: uncultivated organism with predicted taxonomy: Collinsella
  REGION 1..163: note = MG14-230 HNH domain

SEQ ID NO: 4539 - protein, 163 aa, unidentified; identical to SEQ ID NO: 4421
  REGION 1..163: note = Description of Unknown: uncultivated organism with predicted taxonomy: Collinsella
  REGION 1..163: note = MG14-231 HNH domain

SEQ ID NO: 4540 - protein, 163 aa, unidentified; identical to SEQ ID NO: 4352
  REGION 1..163: note = Description of Unknown: uncultivated organism with predicted taxonomy: Collinsella
  REGION 1..163: note = MG14-232 HNH domain

SEQ ID NO: 4541 - protein, 163 aa, unidentified; identical to SEQ ID NO: 4347
  REGION 1..163: note = Description of Unknown: uncultivated organism with predicted taxonomy: Collinsella
  REGION 1..163: note = MG14-233 HNH domain

SEQ ID NO: 4542 - protein, 163 aa, unidentified; identical to SEQ ID NO: 4352
  REGION 1..163: note = Description of Unknown: uncultivated organism with predicted taxonomy: Collinsella
  REGION 1..163: note = MG14-234 HNH domain

SEQ ID NO: 4543 - protein, 163 aa, unidentified; identical to SEQ ID NO: 4425
  REGION 1..163: note = Description of Unknown: uncultivated organism with predicted taxonomy: Collinsella
  REGION 1..163: note = MG14-235 HNH domain

SEQ ID NO: 4544 - protein, 163 aa, unidentified; identical to SEQ ID NO: 4347
  REGION 1..163: note = Description of Unknown: uncultivated organism with predicted taxonomy: Collinsella
  REGION 1..163: note = MG14-236 HNH domain

SEQ ID NO: 4545 - protein, 163 aa, unidentified; identical to SEQ ID NO: 4347
  REGION 1..163: note = Description of Unknown: uncultivated organism with predicted taxonomy: Collinsella
  REGION 1..163: note = MG14-237 HNH domain

SEQ ID NO: 4546 - protein, 171 aa, unidentified; identical to SEQ ID NO: 4417
  REGION 1..171: note = Description of Unknown: uncultivated organism with predicted taxonomy: Atopobium sp. ICM42b
  REGION 1..171: note = MG14-238 HNH domain

SEQ ID NO: 4547 - protein, 163 aa, unidentified; identical to SEQ ID NO: 4389
  REGION 1..163: note = Description of Unknown: uncultivated organism with predicted taxonomy: Collinsella
  REGION 1..163: note = MG14-239 HNH domain

SEQ ID NO: 4548 - protein, 163 aa, unidentified; identical to SEQ ID NO: 4407
  REGION 1..163: note = Description of Unknown: uncultivated organism with predicted taxonomy: Collinsella
  REGION 1..163: note = MG14-240 HNH domain

SEQ ID NO: 4549 - protein, 163 aa, unidentified; identical to SEQ ID NO: 4430
  REGION 1..163: note = Description of Unknown: uncultivated organism with predicted taxonomy: Collinsella
  REGION 1..163: note = MG14-241 HNH domain

SEQ ID NO: 4550 - protein, 163 aa, unidentified; identical to SEQ ID NO: 4388
  REGION 1..163: note = Description of Unknown: uncultivated organism with predicted taxonomy: Collinsella
  REGION 1..163: note = MG14-242 HNH domain

SEQ ID NO: 4551 - protein, 163 aa, unidentified; identical to SEQ ID NO: 4352
  REGION 1..163: note = Description of Unknown: uncultivated organism with predicted taxonomy: Collinsella
  REGION 1..163: note = MG14-243 HNH domain

SEQ ID NO: 4552 - protein, 167 aa, unidentified
  REGION 1..167: note = Description of Unknown: uncultivated organism
  REGION 1..167: note = MG14-244 HNH domain
DLKMSKREKDAVAKRQRTNEAANKKRATLAAGILGCEPSEVSHLVIRKLALREEQSDKDIYTGAAIDLQRLVEDDHYCEIGHILPYSRTGMGGWNNEVLVLAASNQKKRERTPYEWMQQDAGKAGVPAWDEYSSRVTATIDNPRKRRNLLCKDTGDEAMNGFLLRDL

SEQ ID NO: 4553 - protein, 165 aa, unidentified
  REGION 1..165: note = Description of Unknown: uncultivated organism with predicted taxonomy: Olsenella
  REGION 1..165: note = MG14-245 HNH domain
DLKMSNKEKATVSKNQRANEAANKKWAAKAANILGCSPEEVPGRIVRKLAMREEQGDKDAYTGAAIDLEHLVRDDRYCEIDHILPYSRTCDDSRANKVLVLSKSNQDKRERTPYEWMTSGEPGAPDWDEYRNRVMATVKYARKRANLLNTDLGPNVQAQFLARNL

SEQ ID NO: 4554 - protein, 166 aa, unidentified
  REGION 1..166: note = Description of Unknown: uncultivated organism with predicted taxonomy: Coriobacteriales
  REGION 1..166: note = MG14-246 HNH domain
ELKQSSKEKKSIAKSNLQNKKDNERIAKTIAELLGCSPDDVRGKQIRRFALREEQGCKDAYTGDSIDLMRMLTEDRYTEIDHILPYSRTCDDSRANKVLVLQKSNQDKKERTPWEWMSDDASKGAPDWEEFKARTLTNHRLSYKKRDHLLNQNLNGQEQSFIDRNL

SEQ ID NO: 4555 - protein, 166 aa, unidentified; identical to SEQ ID NO: 4554
  REGION 1..166: note = Description of Unknown: uncultivated organism with predicted taxonomy: Coriobacteriales
  REGION 1..166: note = MG14-247 HNH domain

SEQ ID NO: 4556 - protein, 166 aa, unidentified; identical to SEQ ID NO: 4554
  REGION 1..166: note = Description of Unknown: uncultivated organism
  REGION 1..166: note = MG14-248 HNH domain

SEQ ID NO: 4557 - protein, 166 aa, unidentified; identical to SEQ ID NO: 4554
  REGION 1..166: note = Description of Unknown: uncultivated organism with predicted taxonomy: Olsenella
  REGION 1..166: note = MG14-249 HNH domain

SEQ ID NO: 4558 - protein, 167 aa, unidentified
  REGION 1..167: note = Description of Unknown: uncultivated organism with predicted taxonomy: Olsenella
  REGION 1..167: note = MG14-250 HNH domain
ELKMSAREKEMVSKRQRANETANKNWAAIAAKILCCEPEEVPGQTIRKLAFREEQGEKDIYTNAPIDLEKLVTDNRYCEIDHVLPYSRTCDDSRANKVLVLSASNQNKRERTPYEWMSQDAGKAGTPKWSEYSARVIATVKNPRKRANLLNMDLDKDAESEFLQRNL

SEQ ID NO: 4559 - protein, 167 aa, unidentified
  REGION 1..167: note = Description of Unknown: uncultivated organism
  REGION 1..167: note = MG14-251 HNH domain
NLKMSKREKDAIAKRQRSNEAANKKWAALAAGILDCEPSEVPHLVIRKLALREEQGDKDVYTGAAIDLERLVADDHYCEIDHILPYSRTGMSGWNNEVLVLAASNQKKRERTPYEWMQQDAGKSGVPAWDAYSSRVAATIGNPRKRRNLLCMDTGQEAMNGFLLRDL

SEQ ID NO: 4560 - protein, 167 aa, unidentified
  REGION 1..167: note = Description of Unknown: uncultivated organism with predicted taxonomy: Olsenella umbonata
  REGION 1..167: note = MG14-252 HNH domain
DLKRSKHEKDLISKRNRENERKNKQWRAQAAEIQGIDPDEVRPKLLKKMALWEEQGGLDAYTGHKIEFDRMISDDKYCEIDHVLPYSRTCDDSRSNKVLVLAKSNQDKRERTPYEWMTQDAQKGAPSWDEYQARVIANRHISPRKRRYLLNNNLGPDQESDFLNRNL

SEQ ID NO: 4561 - protein, 164 aa, unidentified
  REGION 1..164: note = Description of Unknown: uncultivated organism with predicted taxonomy: Atopobium sp. ICM42b
  REGION 1..164: note = MG14-253 HNH domain
DLKNSKAARDMIAKRQRDREKEKNALRKVIAELLSCELEDVTSNQLFRYELRQEQGDVDVYTGEQIDLMRMLLDQSYTQIDHILPYSRTAIDSRSNKVLVLSGSNAAKGERTPLEWMEEDVGAPDKDQYQSRIHSMSLPAAKKEKLLRRELTDADSRGFLDRNL

SEQ ID NO: 4562 - protein, 167 aa, unidentified; identical to SEQ ID NO: 4558
  REGION 1..167: note = Description of Unknown: uncultivated organism with predicted taxonomy: Olsenella sp. KH3B4
  REGION 1..167: note = MG14-254 HNH domain

SEQ ID NO: 4563 - protein, 167 aa, unidentified; identical to SEQ ID NO: 4560
  REGION 1..167: note = Description of Unknown: uncultivated organism with predicted taxonomy: Olsenella
  REGION 1..167: note = MG14-255 HNH domain

SEQ ID NO: 4564 - protein, 164 aa, unidentified
  REGION 1..164: note = Description of Unknown: uncultivated organism with predicted taxonomy: Olsenella
  REGION 1..164: note = MG14-256 HNH domain
DLKNSKAVKDKISNQQRRREAEKATLRRTIAELLQCEPDDVTGGQLLRYELRQEQNDQDVYTGDSIDLMRMLRDQSYTQIDHILPYSRTAIDSRSNKVLVLASSNAAKGERTPLEWMEQDANGPSIDAYQSRVHALNLPSAKKEKLLRRELTEDDAKHFLDRNL

SEQ ID NO: 4565 - protein, 160 aa, unidentified
  REGION 1..160: note = Description of Unknown: uncultivated organism with predicted taxonomy: Megasphaera
  REGION 1..160: note = MG15-1 HNH domain
ELARSFRDRKKMEKGMQENQAKNEKIRQRLISEFGVLRPKGMDIVKFKLCEEQNGECAYSQKHFDMEKLLKDPSYAEVDHIIPYSRSFDDSYNNKVLVLTKENREKRNRIPMEYLADAPERKNRFIHWVKSTIRNSRKRENLLRTDYTATTENEWKRRNL

SEQ ID NO: 4566 - protein, 159 aa, unidentified
  REGION 1..159: note = Description of Unknown: uncultivated organism with predicted taxonomy: Selenomonas sp. AE3005
  REGION 1..159: note = MG15-3 HNH domain
EMGRTFQARRDMMKSMEDNSAKNEKLKEELKGYGVMHPSGLDIVKLKLYKDQGGVCAYSLAAMPIEKVFKEHDYAEVDHILPYSRSFDDSYSNKVLVLTKENRDKGNRTPMEYMANMPGRKHDFITWVNSSIRDFRKRDNLLLENFDEEREDAWKERHL

SEQ ID NO: 4567 - protein, 159 aa, unidentified; identical to SEQ ID NO: 4566
  REGION 1..159: note = Description of Unknown: uncultivated organism with predicted taxonomy: Selenomonas sp. AE3005
  REGION 1..159: note = MG15-4 HNH domain

SEQ ID NO: 4568 - protein, 160 aa, unidentified
  REGION 1..160: note = Description of Unknown: uncultivated organism with predicted taxonomy: Veillonellales
  REGION 1..160: note = MG15-6 HNH domain
ELARSFKDRAAMDHRMKENYAKNEKIKERLSKEFHIMNPTGQDIVKWKLYEQQQGCCAYSQKPFDVDRLLHDGNYAEVDHILPYSRSFDDTYRNKVLVLEKENRDKGNRTPMEYLADKPERKEKFIAWVKTVIKDSKKREHLLRVKYGRDEEAEWKQRHL

SEQ ID NO: 4569 - protein, 160 aa, unidentified
  REGION 1..160: note = Description of Unknown: uncultivated organism with predicted taxonomy: Megasphaera stantonii
  REGION 1..160: note = MG15-7 HNH domain
ELAKNFRDRKKMEKGMQENQAKNEKIRQRLMSEFGVLRPKGMDIVKFKLCEEQNGECAYSQKHFDMEKLLRDPSYAEVDHIIPYSRSFDDSYNNKVLVLTKENREKRNRIPMEYLADATERKNRFIHWVKSTIRNSRKRENLLRTDYTATTENEWKRRNL

SEQ ID NO: 4570 - protein, 160 aa, unidentified
  REGION 1..160: note = Description of Unknown: uncultivated organism with predicted taxonomy: Dialister
  REGION 1..160: note = MG15-8 HNH domain
ELARSFKDRAAMDHRMKENYAKNEKIKERLSKEFHIMNPRGQDIVKWKLYEQQQGCCAYSQKPFDVDRLLHDGNYAEVDHILPYSRSFDDTYRNKVLVLEKENRDKGNRTPMEYLADKPERKERFIAWVKTTIKDSKKREHLLRVKYGRDEEAEWKQRHL

SEQ ID NO: 4571 - protein, 160 aa, unidentified
  REGION 1..160: note = Description of Unknown: uncultivated organism with predicted taxonomy: Dialister invisus
  REGION 1..160: note = MG15-9 HNH domain
ELARNFRDRKKMEKGMQENQAKNEKIRQRLISEFGVLRPKGMDIVKFKLCEEQNGECAYSQKHFDMEKLLRDPSYAEVDHIIPYSRSFDDSYNNKVLVLTKENREKRNRIPMEYLADATERKNRFIHWVKSTIRNSRKRENLLRTDYTETTENEWKRRNL

SEQ ID NO: 4572 - protein, 160 aa, unidentified
  REGION 1..160: note = Description of Unknown: uncultivated organism with predicted taxonomy: Dialister
  REGION 1..160: note = MG15-10 HNH domain
ELARNFRDRKKMEKGMQENQAKNEKIRQCLISEFGVLRPKGMDIVKFKLCEEQNGECAYSQKHFDMEKLLRDPSYAEVDHIIPYSRSFDDSYNNKVLVLTKENREKRNRIPMEYLADAPERKNRFIHWVKSTIRNSRKRENLLRIDYTETTENEWKRRNL

SEQ ID NO: 4573 - protein, 160 aa, unidentified
  REGION 1..160: note = Description of Unknown: uncultivated organism with predicted taxonomy: Dialister
  REGION 1..160: note = MG15-11 HNH domain
ELARNFRDRKKMEKGMQENQAKNEKIRQRLISEFGVLRPKGMDIVKFKLCEEQNGECAYSQKHFDMEKLLRDPSYAEVDHIIPYSRSFDDSYNNKVLVLTKENREKRNRIPMEYLADAPERKNRFIHWVKSTIRNSRKRENLLRIDYTETTENEWKRRNL

SEQ ID NO: 4574 - protein, 160 aa, unidentified
  REGION 1..160: note = Description of Unknown: uncultivated organism with predicted taxonomy: Megasphaera micronuciformis
  REGION 1..160: note = MG15-12 HNH domain
ELAKSFDERQKMTKSIEENQSHNERIKERLQKEFNVPYPSGQDIVKLKLYEEQNETCAYSQKHMDAHRLFHENNYAEVDHIIPYSRSFDDTYNNKVLVLTAENRQKGNRTPMEYLSGDEARKKQFVAWVKSDVKKPRKRENLLREKFTDDAENDWKARHL

SEQ ID NO: 4575 - protein, 160 aa, unidentified
  REGION 1..160: note = Description of Unknown: uncultivated organism with predicted taxonomy: Megasphaera sp. AM44-1BH
  REGION 1..160: note = MG15-13 HNH domain
ELAKNFRDRKKMEKGMQENQAKNEKIRQRLMSEFGVLRPKGMDIVKFKLCEEQNGECAYSQKHFDMEKLLRDPSYAEVDHIIPYSRSFDDSYNNKVLVLTKENREKRNRIPMEYLADATERKNRFIHWVKSTIRNSRKRENLLRTDYTETIENEWKRRNL

SEQ ID NO: 4576 - protein, 160 aa, unidentified
  REGION 1..160: note = Description of Unknown: uncultivated organism with predicted taxonomy: Dialister
  REGION 1..160: note = MG15-14 HNH domain
ELAKNFRDRKKMEKGMQENQAKNEKIRQRLMSEFGVLRPKGMDIVKFKLCEEQNGECAYSQKHFDMEKLLRDPSYAEVDHIIPYSRSFDDSYNNKVLVLTKENREKRNRIPMEYLADAPERKNRFIHWVKSTIRNSRKRENLLRIDYTETTENEWKRRNL

SEQ ID NO: 4577 - protein, 160 aa, unidentified
  REGION 1..160: note = Description of Unknown: uncultivated organism with predicted taxonomy: Megasphaera micronuciformis
  REGION 1..160: note = MG15-15 HNH domain
ELAKSFDERQKMTKSIEENQSHNERIKERLQKEFNVPYPSGQDIVKLKLYEEQNETCAYSQKHIDAAKLFHDPNYAEVDHIIPYSRSFDDTYNNKVLVLTAENRQKGNRTPMEYLSGDEARKKQFVAWVKSDIKKPRKRENLLREKFTADAENDWKARHL

SEQ ID NO: 4578 - protein, 159 aa, unidentified
  REGION 1..159: note = Description of Unknown: uncultivated organism with predicted taxonomy: Megasphaera stantonii
  REGION 1..159: note = MG15-16 HNH domain
ELAKSAKERTELEKAMKDNQSRNEKIKTKLHELNVMQPTGLDIVKYKLYEQQQGDCAYSQKKFDVNRLLHDPTYAEVDHIIPYSRSFDDTYRNKVLVLTKENRDKGNRTPMEYFQDKPERKEAFINWVKRTISDGKKRNNLLRVNYSADAEKEWKDRHL

SEQ ID NO: 4579 - protein, 160 aa, unidentified; identical to SEQ ID NO: 4573
  REGION 1..160: note = Description of Unknown: uncultivated organism with predicted taxonomy: Dialister
  REGION 1..160: note = MG15-17 HNH domain

SEQ ID NO: 4580 - protein, 160 aa, unidentified
  REGION 1..160: note = Description of Unknown: uncultivated organism with predicted taxonomy: Megasphaera micronuciformis
  REGION 1..160: note = MG15-18 HNH domain
ELAKSFDERQKMTKSIEENQSHNERIKERLQKEFNVPYPSGQDIVKLKLYEEQNETCAYSQKHIDAAKLFHDPNYAEVDHIIPYSRSFDDTYNNKVLVLTAENRQKGNRTPMEYLSGDEARKKQFVAWVKSDIKKPRKRENLLREKFTADAENDWKVRHL

SEQ ID NO: 4581 - protein, 160 aa, unidentified
  REGION 1..160: note = Description of Unknown: uncultivated organism with predicted taxonomy: Megasphaera micronuciformis
  REGION 1..160: note = MG15-19 HNH domain
ELAKSFDERQKMTKSIEENQSHNERIKERLQKEFNVPYPSGQDIVKLKLYEEQNETCAYSQKHIDAAKLFHDPNYAEVDHIIPYSRSFDDTYNNKVLVLTAENRQKGNRTPMEYFSGDEARKKQFVAWVKSDIKKPRKRENLLREKFTADAENDWKIRHL

SEQ ID NO: 4582 - protein, 160 aa, unidentified; identical to SEQ ID NO: 4565
  REGION 1..160: note = Description of Unknown: uncultivated organism with predicted taxonomy: Dialister
  REGION 1..160: note = MG15-20 HNH domain

SEQ ID NO: 4583 - protein, 160 aa, unidentified; identical to SEQ ID NO: 4575
  REGION 1..160: note = Description of Unknown: uncultivated organism with predicted taxonomy: Dialister
  REGION 1..160: note = MG15-21 HNH domain

SEQ ID NO: 4584 - protein, 160 aa, unidentified
  REGION 1..160: note = Description of Unknown: uncultivated organism with predicted taxonomy: Dialister
  REGION 1..160: note = MG15-22 HNH domain
ELARSFRDRKKMEKGMQENQAKNEKIRQRLISEFGVLRPKGMDIVKSKLCEEQNGECAYSQKHFDMEKLLKDPSYAEVDHIIPYSRSFDDSYNNKVLVLTKENREKRNRIPMEYLADAPERKNRFIHWVKSTIRNSRKRENLLRTDYTATTENEWKRRNL

SEQ ID NO: 4585 - protein, 160 aa, unidentified
  REGION 1..160: note = Description of Unknown: uncultivated organism with predicted taxonomy: Dialister
  REGION 1..160: note = MG15-23 HNH domain
ELARNFRDRKKIEKGMQENQAKNEKIRQRLISEFGVLRPKGMDIVKFKLCEEQNGECAYSQKHFDMEKLLRDPSYAEVDHIIPYSRSFDDSYNNKVLVLTKENREKRNRIPMEYLADAPERKNRFIHWVKSTIRNSRKRENLLRIDYTETTENEWKRRNL

SEQ ID NO: 4586 - protein, 160 aa, unidentified
  REGION 1..160: note = Description of Unknown: uncultivated organism with predicted taxonomy: Dialister invisus
  REGION 1..160: note = MG15-24 HNH domain
ELAKNFRDRKKMEKGMQENQAKNEKIRQRLMSEFGVLCPKGMDIVKFKLCEEQNGECAYSQKHFDMEKLLKDPSYAEVDHIIPYSRSFDDSYNNKVLVLTKENREKRNRIPMEYLADAPEQKNRFIHWVKSTIRNSRKRENLLRTDYTAATENEWKRRNL

SEQ ID NO: 4587 - protein, 160 aa, unidentified; identical to SEQ ID NO: 4586
  REGION 1..160: note = Description of Unknown: uncultivated organism with predicted taxonomy: Dialister
  REGION 1..160: note = MG15-25 HNH domain

SEQ ID NO: 4588 - protein, 160 aa, unidentified; identical to SEQ ID NO: 4565
  REGION 1..160: note = Description of Unknown: uncultivated organism with predicted taxonomy: Dialister
  REGION 1..160: note = MG15-26 HNH domain

SEQ ID NO: 4589 - protein, 160 aa, unidentified; identical to SEQ ID NO: 4573
  REGION 1..160: note = Description of Unknown: uncultivated organism with predicted taxonomy: Dialister
  REGION 1..160: note = MG15-27 HNH domain

SEQ ID NO: 4590 - protein, 160 aa, unidentified; identical to SEQ ID NO: 4565
  REGION 1..160: note = Description of Unknown: uncultivated organism with predicted taxonomy: Dialister
  REGION 1..160: note = MG15-28 HNH domain

SEQ ID NO: 4591 - protein, 160 aa, unidentified; identical to SEQ ID NO: 4565
  REGION 1..160: note = Description of Unknown: uncultivated organism with predicted taxonomy: Dialister invisus
  REGION 1..160: note = MG15-29 HNH domain

SEQ ID NO: 4592 - protein, 160 aa, unidentified; identical to SEQ ID NO: 4575
  REGION 1..160: note = Description of Unknown: uncultivated organism with predicted taxonomy: Megasphaera sp. AM44-1BH
  REGION 1..160: note = MG15-30 HNH domain

SEQ ID NO: 4593 - protein, 160 aa, unidentified
  REGION 1..160: note = Description of Unknown: uncultivated organism with predicted taxonomy: Dialister
  REGION 1..160: note = MG15-31 HNH domain
ELARSFRDRKKMEKGMQENQAKNEKIRQRLISEFGVLRPKGMDIVKFKLCEEQNGECAYSQKHFDMEKLLKDPSYAEVDHIIPYSRSFDDSYNNKVLVLTKENREKRNRIPMEYLADAPERKNRFIHWVKRTIRNSRKRENLLRTDYTATTENEWKRRNL

SEQ ID NO: 4594 - protein, 160 aa, unidentified; identical to SEQ ID NO: 4565
  REGION 1..160: note = Description of Unknown: uncultivated organism with predicted taxonomy: Veillonellales
  REGION 1..160: note = MG15-32 HNH domain

SEQ ID NO: 4595 - protein, 160 aa, unidentified; identical to SEQ ID NO: 4573
  REGION 1..160: note = Description of Unknown: uncultivated organism with predicted taxonomy: Dialister
  REGION 1..160: note = MG15-33 HNH domain

SEQ ID NO: 4596 - protein, 160 aa, unidentified; identical to SEQ ID NO: 4586
  REGION 1..160: note = Description of Unknown: uncultivated organism with predicted taxonomy: Megasphaera
  REGION 1..160: note = MG15-34 HNH domain

SEQ ID NO: 4597 - protein, 159 aa, unidentified
  REGION 1..159: note = Description of Unknown: uncultivated organism with predicted taxonomy: Megasphaera
  REGION 1..159: note = MG15-35 HNH domain
ELAKSAKERTELEKAMKDNQSRNEKIKTKLHELNVMQPTGLDIVKYKLYKQQQGDCAYSQKKFDVNRLLHDPTYAEVDHIIPYSRSFDDTYRNKVLVLTKENRDKGNRTPMEYFQDKPERKEAFINWVKRTISDGKKRNNLLRVNYSADAEKEWKDRHL

SEQ ID NO: 4598 - protein, 160 aa, unidentified; identical to SEQ ID NO: 4586
  REGION 1..160: note = Description of Unknown: uncultivated organism with predicted taxonomy: Dialister
  REGION 1..160: note = MG15-36 HNH domain

SEQ ID NO: 4599 - protein, 160 aa, unidentified; identical to SEQ ID NO: 4586
  REGION 1..160: note = Description of Unknown: uncultivated organism with predicted taxonomy: Dialister
  REGION 1..160: note = MG15-37 HNH domain

SEQ ID NO: 4600 - protein, 160 aa, unidentified
  REGION 1..160: note = Description of Unknown: uncultivated organism with predicted taxonomy: Selenomonas bovis
  REGION 1..160: note = MG15-38 HNH domain
EMARSRQDRDKMEKDIKNNRARNEAIKKELQELGLRNPKGQDIIKWRLYKEQDGFCAYSQKQFDVERLLHDGSYAEIDHILPYSRSFDDSYHNKVLVMAAENRQKGNRTPLEYMAGEEERIHAFRIWVNSRIHDFRKRQNLLREHFDKESTEKDWKERNL

SEQ ID NO: 4601 - protein, 160 aa, unidentified; identical to SEQ ID NO: 4565
  REGION 1..160: note = Description of Unknown: uncultivated organism with predicted taxonomy: Dialister
  REGION 1..160: note = MG15-39 HNH domain

SEQ ID NO: 4602 - protein, 160 aa, unidentified; identical to SEQ ID NO: 4565
  REGION 1..160: note = Description of Unknown: uncultivated organism with predicted taxonomy: Dialister
  REGION 1..160: note = MG15-40 HNH domain

SEQ ID NO: 4603 - protein, 160 aa, unidentified
  REGION 1..160: note = Description of Unknown: uncultivated organism with predicted taxonomy: Megasphaera sp. AM44-1BH
  REGION 1..160: note = MG15-41 HNH domain
ELARSFQNRVKMQKSMEENQSRNEKIKERLVQEYNILSPTGMDIVKFKLYEQQQGACAYSQKMFNIYQLFHDPSYAEVDHIIPYSRSFDDSYRNKVLVFTAENRNKGNRTPMEYLKNQSERKEQFITWVKNTIRDYKKRNNLLRETYTSEDEADWKRRHL

SEQ ID NO: 4604 - protein, 160 aa, unidentified
  REGION 1..160: note = Description of Unknown: uncultivated organism with predicted taxonomy: Veillonellales
  REGION 1..160: note = MG15-42 HNH domain
ELARNFEDRRTMQKSMEDNQKRNEEIKERLVKEYNVLQPTGMDIVKFKLYEEQQGACAYSQKMFDVNRVLHDPSYSEVDHIIPYSRSFDDSYNNKVLVLTKENRDKGNRTPMEYLKDNPVRIDAFTTWVNAIVRNSRKRANLLKSSFTEDAEQEWKRRHL

SEQ ID NO: 4605 - protein, 160 aa, unidentified; identical to SEQ ID NO: 4573
  REGION 1..160: note = Description of Unknown: uncultivated organism with predicted taxonomy: Veillonellales
  REGION 1..160: note = MG15-43 HNH domain

SEQ ID NO: 4606 - protein, 160 aa, unidentified; identical to SEQ ID NO: 4604
  REGION 1..160: note = Description of Unknown: uncultivated organism with predicted taxonomy: Veillonellales
  REGION 1..160: note = MG15-44 HNH domain

SEQ ID NO: 4607 - protein, 160 aa, unidentified; identical to SEQ ID NO: 4600
  REGION 1..160: note = Description of Unknown: uncultivated organism with predicted taxonomy: Selenomonas bovis
  REGION 1..160: note = MG15-45 HNH domain

SEQ ID NO: 4608 - protein, 160 aa, unidentified
  REGION 1..160: note = Description of Unknown: uncultivated organism with predicted taxonomy: Dialister
  REGION 1..160: note = MG15-46 HNH domain
ELAKNFRDRKKMEKGMQENQAKNEKIRQRLMSEFGVLRPKGMDIVKFKLCEEQNGECAYSQKHFDMEKLLRDPSYAEVDHIIPYSRSFDDSYNNKVLVLTKENREKRNRIPMEYLADATERKNRFIHWVKSTIRNSRKRENLLRTDYTETTENEWKRRNL

SEQ ID NO: 4609 - protein, 160 aa, unidentified
  REGION 1..160: note = Description of Unknown: uncultivated organism with predicted taxonomy: Dialister
  REGION 1..160: note = MG15-47 HNH domain
ELARSFKDRAAMDHRMKENYAKNEKIKERLSKEFHIMNPRGQDIVKWKLYEQQQGCCAYSQKPFDVDRLLHDGNYAEVDHILPYSRSFDDTYRNKVLVLEKENRDKGNRTPMEYLADKPERKEKFIAWVKTTIKDSKKREHLLRVKYGRDEEAEWKQRHL

SEQ ID NO: 4610 - protein, 160 aa, unidentified; identical to SEQ ID NO: 4600
  REGION 1..160: note = Description of Unknown: uncultivated organism with predicted taxonomy: Selenomonas bovis
  REGION 1..160: note = MG15-48 HNH domain

SEQ ID NO: 4611 - protein, 160 aa, unidentified; identical to SEQ ID NO: 4586
  REGION 1..160: note = Description of Unknown: uncultivated organism with predicted taxonomy: Dialister
  REGION 1..160: note = MG15-49 HNH domain

SEQ ID NO: 4612 - protein, 160 aa, unidentified; identical to SEQ ID NO: 4565
  REGION 1..160: note = Description of Unknown: uncultivated organism with predicted taxonomy: Dialister
  REGION 1..160: note = MG15-50 HNH domain

SEQ ID NO: 4613 - protein, 160 aa, unidentified; identical to SEQ ID NO: 4573
  REGION 1..160: note = Description of Unknown: uncultivated organism with predicted taxonomy: Dialister
  REGION 1..160: note = MG15-51 HNH domain

SEQ ID NO: 4614 - protein, 160 aa, unidentified; identical to SEQ ID NO: 4586
  REGION 1..160: note = Description of Unknown: uncultivated organism with predicted taxonomy: Veillonellales
  REGION 1..160: note = MG15-52 HNH domain

SEQ ID NO: 4615 - protein, 160 aa, unidentified; identical to SEQ ID NO: 4586
  REGION 1..160: note = Description of Unknown: uncultivated organism with predicted taxonomy: Dialister invisus
  REGION 1..160: note = MG15-53 HNH domain

SEQ ID NO: 4616 - protein, 160 aa, unidentified; identical to SEQ ID NO: 4573
  REGION 1..160: note = Description of Unknown: uncultivated organism with predicted taxonomy: Dialister
  REGION 1..160: note = MG15-54 HNH domain

SEQ ID NO: 4617 - protein, 160 aa, unidentified
  REGION 1..160: note = Description of Unknown: uncultivated organism with predicted taxonomy: Megasphaera stantonii
  REGION 1..160: note = MG15-55 HNH domain
ELAKSFDERQKMTKSIEENQSHNERIKERLQKEFNVPYPSGQDIVKLKLYEEQNETCAYSQKHIDAAKLFHDPNYAEVDHIIPYSRSFDDTYNNKVLVLTAENRQKGNRTPMEYLSGDEARKKQFVAWVKSDVKKPRKRENLLREKFTADAENDWKVRHL

SEQ ID NO: 4618 - protein, 160 aa, unidentified; identical to SEQ ID NO: 4600
  REGION 1..160: note = Description of Unknown: uncultivated organism with predicted taxonomy: Selenomonas bovis
  REGION 1..160: note = MG15-56 HNH domain

SEQ ID NO: 4619 - protein, 160 aa, unidentified; identical to SEQ ID NO: 4573
  REGION 1..160: note = Description of Unknown: uncultivated organism with predicted taxonomy: Dialister
  REGION 1..160: note = MG15-57 HNH domain

SEQ ID NO: 4620 - protein, 160 aa, unidentified; identical to SEQ ID NO: 4608
  REGION 1..160: note = Description of Unknown: uncultivated organism with predicted taxonomy: Dialister
  REGION 1..160: note = MG15-58 HNH domain

SEQ ID NO: 4621 - protein, 160 aa, unidentified; identical to SEQ ID NO: 4608
  REGION 1..160: note = Description of Unknown: uncultivated organism with predicted taxonomy: Dialister
  REGION 1..160: note = MG15-59 HNH domain

SEQ ID NO: 4622 - protein, 160 aa, unidentified; identical to SEQ ID NO: 4586
  REGION 1..160: note = Description of Unknown: uncultivated organism with predicted taxonomy: Megasphaera
  REGION 1..160: note = MG15-60 HNH domain

SEQ ID NO: 4623 - protein, 160 aa, unidentified; identical to SEQ ID NO: 4586
  REGION 1..160: note = Description of Unknown: uncultivated organism with predicted taxonomy: Dialister
  REGION 1..160: note = MG15-61 HNH domain

SEQ ID NO: 4624 - protein, 160 aa, unidentified; identical to SEQ ID NO: 4580
  REGION 1..160: note = Description of Unknown: uncultivated organism with predicted taxonomy: Megasphaera stantonii
  REGION 1..160: note = MG15-62 HNH domain

SEQ ID NO: 4625 - protein, 160 aa, unidentified
  REGION 1..160: note = Description of Unknown: uncultivated organism with predicted taxonomy: Dialister
  REGION 1..160: note = MG15-63 HNH domain
ELARNFRDRKKMEKGMQENQAKNEKIRQRLISEFGVLRPKGMDIVKFKLCEEQNGECAYSQKHFDMEKLLRDPSYAEVDHIIPYSRSFDDSYNNKVLVLTKENREKRNRIPMEYLADAPERKNRLIHWVKSTIRNSRKRENLLRIDYTETTENEWKRRNL

SEQ ID NO: 4626 - protein, 160 aa, unidentified; identical to SEQ ID NO: 4608
  REGION 1..160: note = Description of Unknown: uncultivated organism with predicted taxonomy: Megasphaera
  REGION 1..160: note = MG15-64 HNH domain

SEQ ID NO: 4627 - protein, 160 aa, unidentified; identical to SEQ ID NO: 4565
  REGION 1..160: note = Description of Unknown: uncultivated organism with predicted taxonomy: Dialister
  REGION 1..160: note = MG15-65 HNH domain

SEQ ID NO: 4628 - protein, 160 aa, unidentified; identical to SEQ ID NO: 4577
  REGION 1..160: note = Description of Unknown: uncultivated organism with predicted taxonomy: Megasphaera micronuciformis
  REGION 1..160: note = MG15-66 HNH domain

SEQ ID NO: 4629 - protein, 160 aa, unidentified
  REGION 1..160: note = Description of Unknown: uncultivated organism with predicted taxonomy: Megasphaera stantonii
  REGION 1..160: note = MG15-67 HNH domain
ELAKSFDERQKMAKSIEENQSHNERIKERLQKEFNVPYPSGQDIVKLKLYEEQNETCAYSQKHMDAHRLFHEDNYAEVDHIIPYSRSFDDTYNNKVLVLTAENRQKGNRTPMEYLSGDEARKKQFVAWVKSDIKKPRKRENLLREKFTTDAENDWKIRHL

SEQ ID NO: 4630 - protein, 159 aa, unidentified
  REGION 1..159: note = Description of Unknown: uncultivated organism with predicted taxonomy: Veillonellaceae bacterium DNF00626
  REGION 1..159: note = MG15-68 HNH domain
DLGRNFKDRDLIKSNMEKNQKKNDEIKERIVNEFGIMQPKSQDIVKLKLCEQQDNVCVYSQKSFDLHRLFEKNYVEVDHIIPYSRSFDDTYANKVLVFNKENRDKGNKLPLEYLANQPERKEKFIAWVKSHIKDRKKRDNLLRESYSAEDKNGWKQRNL

SEQ ID NO: 4631 - protein, 160 aa, unidentified
  REGION 1..160: note = Description of Unknown: uncultivated organism with predicted taxonomy: Dialister
  REGION 1..160: note = MG15-69 HNH domain
ELARSFKDRAAMDDRMKENHAKNEEIKEYLSKELHVMSPTGQDIVKWKLYKQQQGYCAYSQKLFDVDKLLHDRTYAEVDHILPYSRSFDDTYRNKVLVLTKENRDKGNRTPMEYLADKPERKEKFIAWVKTTIKDSKKREHLLRVKYGRDEEAEWKQRHL

SEQ ID NO: 4632 - protein, 160 aa, unidentified; identical to SEQ ID NO: 4573
  REGION 1..160: note = Description of Unknown: uncultivated organism with predicted taxonomy: Dialister
  REGION 1..160: note = MG15-70 HNH domain

SEQ ID NO: 4633 - protein, 160 aa, unidentified; identical to SEQ ID NO: 4608
  REGION 1..160: note = Description of Unknown: uncultivated organism with predicted taxonomy: Dialister
  REGION 1..160: note = MG15-71 HNH domain

SEQ ID NO: 4634 - protein, 160 aa, unidentified; identical to SEQ ID NO: 4585
  REGION 1..160: note = Description of Unknown: uncultivated organism with predicted taxonomy: Dialister
  REGION 1..160: note = MG15-72 HNH domain

SEQ ID NO: 4635 - protein, 160 aa, unidentified; identical to SEQ ID NO: 4586
  REGION 1..160: note = Description of Unknown: uncultivated organism with predicted taxonomy: Dialister invisus
  REGION 1..160: note = MG15-73 HNH domain

SEQ ID NO: 4636 - protein, 160 aa, unidentified; identical to SEQ ID NO: 4586
  REGION 1..160: note = Description of Unknown: uncultivated organism with predicted taxonomy: Dialister
  REGION 1..160: note = MG15-74 HNH domain

SEQ ID NO: 4637 - protein, 160 aa, unidentified; identical to SEQ ID NO: 4586
  REGION 1..160: note = Description of Unknown: uncultivated organism with predicted taxonomy: Dialister invisus
  REGION 1..160: note = MG15-75 HNH domain

SEQ ID NO: 4638 - protein, 160 aa, unidentified; identical to SEQ ID NO: 4565
  REGION 1..160: note = Description of Unknown: uncultivated organism with predicted taxonomy: Dialister
  REGION 1..160: note = MG15-76 HNH domain

SEQ ID NO: 4639 - protein, 160 aa, unidentified; identical to SEQ ID NO: 4573
  REGION 1..160: note = Description of Unknown: uncultivated organism with predicted taxonomy: Dialister invisus
  REGION 1..160: note = MG15-77 HNH domain

SEQ ID NO: 4640 - protein, 160 aa, unidentified; identical to SEQ ID NO: 4586
  REGION 1..160: note = Description of Unknown: uncultivated organism with predicted taxonomy: Dialister
  REGION 1..160: note = MG15-78 HNH domain

SEQ ID NO: 4641 - protein, 160 aa, unidentified; identical to SEQ ID NO: 4565
  REGION 1..160: note = Description of Unknown: uncultivated organism with predicted taxonomy: Megasphaera stantonii
  REGION 1..160: note = MG15-79 HNH domain

SEQ ID NO: 4642 - protein, 160 aa, unidentified; identical to SEQ ID NO: 4575
  REGION 1..160: note = Description of Unknown: uncultivated organism with predicted taxonomy: Megasphaera sp. AM44-1BH
  REGION 1..160: note = MG15-80 HNH domain

SEQ ID NO: 4643 - protein, 160 aa, unidentified; identical to SEQ ID NO: 4565
  REGION 1..160: note = Description of Unknown: uncultivated organism with predicted taxonomy: Megasphaera
  REGION 1..160: note = MG15-81 HNH domain

SEQ ID NO: 4644 - protein, 160 aa, unidentified; identical to SEQ ID NO: 4575
  REGION 1..160: note = Description of Unknown: uncultivated organism with predicted taxonomy: Megasphaera sp. AM44-1BH
  REGION 1..160: note = MG15-82 HNH domain

SEQ ID NO: 4645 - protein, 159 aa, unidentified; identical to SEQ ID NO: 4630
  REGION 1..159: note = Description of Unknown: uncultivated organism with predicted taxonomy: Veillonellaceae bacterium DNF00626
  REGION 1..159: note = MG15-83 HNH domain

SEQ ID NO: 4646 - protein, 160 aa, unidentified; identical to SEQ ID NO: 4575
  REGION 1..160: note = Description of Unknown: uncultivated organism with predicted taxonomy: Dialister
  REGION 1..160: note = MG15-84 HNH domain

SEQ ID NO: 4647 - protein, 160 aa, unidentified; identical to SEQ ID NO: 4575
  REGION 1..160: note = Description of Unknown: uncultivated organism with predicted taxonomy: Dialister
  REGION 1..160: note = MG15-85 HNH domain

SEQ ID NO: 4648 - protein, 160 aa, unidentified; identical to SEQ ID NO: 4573
  REGION 1..160: note = Description of Unknown: uncultivated organism with predicted taxonomy: Dialister
  REGION 1..160: note = MG15-86 HNH domain

SEQ ID NO: 4649 - protein, 160 aa, unidentified; identical to SEQ ID NO: 4593
  REGION 1..160: note = Description of Unknown: uncultivated organism with predicted taxonomy: Dialister
  REGION 1..160: note = MG15-87 HNH domain

SEQ ID NO: 4650 - protein, 160 aa, unidentified
  REGION 1..160: note = Description of Unknown: uncultivated organism with predicted taxonomy: Megasphaera sp. AM44-1BH
  REGION 1..160: note = MG15-88 HNH domain
ELAKNFRDRKKMEKGMQENQAKNEKIRQRLMSEFGVLRPKGMDIVKFKLCEEQNGECAYSQKHFDMEKLLRDPSYAEVDHIIPYSRSFDDSYNNKVLVLTKENRKKRNRIPMEYLADATERKNRFIHWVKSTIRNSRKRENLLRTDYTETTENEWKRRNL

SEQ ID NO: 4651 - protein, 160 aa, unidentified; identical to SEQ ID NO: 4573
  REGION 1..160: note = Description of Unknown: uncultivated organism with predicted taxonomy: Dialister
  REGION 1..160: note = MG15-89 HNH domain

SEQ ID NO: 4652 - protein, 160 aa, unidentified; identical to SEQ ID NO: 4576
  REGION 1..160: note = Description of Unknown: uncultivated organism with predicted taxonomy: Dialister
  REGION 1..160: note = MG15-90 HNH domain

SEQ ID NO: 4653 - protein, 160 aa, unidentified; identical to SEQ ID NO: 4608
  REGION 1..160: note = Description of Unknown: uncultivated organism with predicted taxonomy: Dialister
  REGION 1..160: note = MG15-91 HNH domain

SEQ ID NO: 4654 - protein, 159 aa, unidentified; identical to SEQ ID NO: 4578
  REGION 1..159: note = Description of Unknown: uncultivated organism with predicted taxonomy: Firmicutes
  REGION 1..159: note = MG15-92 HNH domain

SEQ ID NO: 4655 - protein, 160 aa, unidentified
  REGION 1..160: note = Description of Unknown: uncultivated organism with predicted taxonomy: Megasphaera micronuciformis
  REGION 1..160: note = MG15-93 HNH domain
ELAKSFDERQKMTKSIEENQSHNERIKERLQKEFNVPYPSGQDIVKLKLYEEQNETCAYSQKHIDAAKLFHDRNYAEVDHIIPYSRSFDDTYNNKVLVLTAENRQKGNRTPMEYLSGDEARKKQFVAWVKSDIKKPRKRENLLREKFTADAENDWKARHL

SEQ ID NO: 4656 - protein, 160 aa, unidentified; identical to SEQ ID NO: 4586
  REGION 1..160: note = Description of Unknown: uncultivated organism with predicted taxonomy: Dialister
  REGION 1..160: note = MG15-94 HNH domain

SEQ ID NO: 4657 - protein, 160 aa, unidentified; identical to SEQ ID NO: 4586
  REGION 1..160: note = Description of Unknown: uncultivated organism with predicted taxonomy: Dialister
  REGION 1..160: note = MG15-95 HNH domain

SEQ ID NO: 4658 - protein, 160 aa, unidentified
  REGION 1..160: note = Description of Unknown: uncultivated organism with predicted taxonomy: Megasphaera micronuciformis
  REGION 1..160: note = MG15-96 HNH domain
ELAKSFDERQKMTKSIEENQSHNERIKERLQKEFNVPYPSGQDIVKLKLYEEQNEICAYSQKHIDAAKLFHDPNYAEVDHIIPYSRSFDDTYNNKVLVLTAENRQKGNRTPMEYLSGDEARKKQFVAWVKSDIKKPRKRENLLREKFTTDAENDWKARHL

SEQ ID NO: 4659 - protein, 160 aa, unidentified; identical to SEQ ID NO: 4581
  REGION 1..160: note = Description of Unknown: uncultivated organism with predicted taxonomy: Megasphaera micronuciformis
  REGION 1..160: note = MG15-97 HNH domain

SEQ ID NO: 4660 - protein, 160 aa, unidentified; identical to SEQ ID NO: 4565
  REGION 1..160: note = Description of Unknown: uncultivated organism with predicted taxonomy: Dialister
  REGION 1..160: note = MG15-98 HNH domain

SEQ ID NO: 4661 - protein, 160 aa, unidentified; identical to SEQ ID NO: 4577
  REGION 1..160: note = Description of Unknown: uncultivated organism with predicted taxonomy: Megasphaera micronuciformis
  REGION 1..160: note = MG15-99 HNH domain

SEQ ID NO: 4662 - protein, 160 aa, unidentified; identical to SEQ ID NO: 4580
  REGION 1..160: note = Description of Unknown: uncultivated organism with predicted taxonomy: Megasphaera stantonii
  REGION 1..160: note = MG15-100 HNH domain

SEQ ID NO: 4663 - protein, 160 aa, unidentified; identical to SEQ ID NO: 4586
  REGION 1..160: note = Description of Unknown: uncultivated organism with predicted taxonomy: Dialister
  REGION 1..160: note = MG15-101 HNH domain

SEQ ID NO: 4664 - protein, 160 aa, unidentified; identical to SEQ ID NO: 4565
  REGION 1..160: note = Description of Unknown: uncultivated organism with predicted taxonomy: Megasphaera
  REGION 1..160: note = MG15-102 HNH domain

SEQ ID NO: 4665 - protein, 160 aa, unidentified; identical to SEQ ID NO: 4603
  REGION 1..160: note = Description of Unknown: uncultivated organism with predicted taxonomy: Megasphaera sp. AM44-1BH
  REGION 1..160: note = MG15-103 HNH domain

SEQ ID NO: 4666 - protein, 160 aa, unidentified
  REGION 1..160: note = Description of Unknown: uncultivated organism with predicted taxonomy: Dialister
  REGION 1..160: note = MG15-104 HNH domain
ELARNFRDRKKMEKGMQENQAKNEKIRQRLISEFGVLRPKGMDIVKFKLCEEQNGECAYSQKHFDMEKLLKDPSYAEVDHIIPYSRSFDDSYNNKVLVLTKENREKRNRIPMEYLADAPERKNRFIHWVKSTIRNSRKRENLLRTDYTATTENEWKRRNL

SEQ ID NO: 4667 - protein, 160 aa, unidentified; identical to SEQ ID NO: 4577
  REGION 1..160: note = Description of Unknown: uncultivated organism with predicted taxonomy: Megasphaera micronuciformis
  REGION 1..160: note = MG15-105 HNH domain

SEQ ID NO: 4668 - protein, 160 aa, unidentified; identical to SEQ ID NO: 4584
  REGION 1..160: note = Description of Unknown: uncultivated organism with predicted taxonomy: Dialister
  REGION 1..160: note = MG15-106 HNH domain

SEQ ID NO: 4669 - protein, 160 aa, unidentified; identical to SEQ ID NO: 4565
  REGION 1..160: note = Description of Unknown: uncultivated organism with predicted taxonomy: Dialister
  REGION 1..160: note = MG15-107 HNH domain

SEQ ID NO: 4670 - protein, 160 aa, unidentified; identical to SEQ ID NO: 4565
  REGION 1..160: note = Description of Unknown: uncultivated organism with predicted taxonomy: Dialister
  REGION 1..160: note = MG15-108 HNH domain

SEQ ID NO: 4671 - protein, 160 aa, unidentified; identical to SEQ ID NO: 4629
  REGION 1..160: note = Description of Unknown: uncultivated organism with predicted taxonomy: Megasphaera stantonii
  REGION 1..160: note = MG15-109 HNH domain

SEQ ID NO: 4672 - protein, 160 aa, unidentified; identical to SEQ ID NO: 4625
  REGION 1..160: note = Description of Unknown: uncultivated organism with predicted taxonomy: Dialister
  REGION 1..160: note = MG15-110 HNH domain

SEQ ID NO: 4673 - protein, 160 aa, unidentified; identical to SEQ ID NO: 4565
  REGION 1..160: note = Description of Unknown: uncultivated organism with predicted taxonomy: Veillonellales
  REGION 1..160: note = MG15-111 HNH domain

SEQ ID NO: 4674 - protein, 160 aa, unidentified; identical to SEQ ID NO: 4586
  REGION 1..160: note = Description of Unknown: uncultivated organism with predicted taxonomy: Dialister
  REGION 1..160: note = MG15-112 HNH domain

SEQ ID NO: 4675 - protein, 160 aa, unidentified; identical to SEQ ID NO: 4565
  REGION 1..160: note = Description of Unknown: uncultivated organism with predicted taxonomy: Dialister
  REGION 1..160: note = MG15-113 HNH domain

SEQ ID NO: 4676 - protein, 160 aa, unidentified
  REGION 1..160: note = Description of Unknown: uncultivated organism with predicted taxonomy: Veillonellales
  REGION 1..160: note = MG15-114 HNH domain
ELARSFKDRAAMDDRMKENHAKNEEIKEYLSKELHVMSPTGQDIVKWKLYKQQQGYCAYSQKPFDVNKLLHDRTYAEVDHILPYSRSFDDTYRNKVLVLTKENRDKGNRTPMEYLADKPERKGKFIAWVKTTIKDSKKREHLLRVKYGRDEEAEWKQRHL

SEQ ID NO: 4677 - protein, 160 aa, unidentified; identical to SEQ ID NO: 4565
  REGION 1..160: note = Description of Unknown: uncultivated organism with predicted taxonomy: Dialister
  REGION 1..160: note = MG15-115 HNH domain

SEQ ID NO: 4678 - protein, 160 aa, unidentified; identical to SEQ ID NO: 4575
  REGION 1..160: note = Description of Unknown: uncultivated organism with predicted taxonomy: Megasphaera sp. AM44-1BH
  REGION 1..160: note = MG15-116 HNH domain

SEQ ID NO: 4679 - protein, 159 aa, unidentified; identical to SEQ ID NO: 4597
  REGION 1..159: note = Description of Unknown: uncultivated organism with predicted taxonomy: Megasphaera
  REGION 1..159: note = MG15-117 HNH domain

SEQ ID NO: 4680 - protein, 160 aa, unidentified; identical to SEQ ID NO: 4573
  REGION 1..160: note = Description of Unknown: uncultivated organism with predicted taxonomy: Dialister
  REGION 1..160: note = MG15-118 HNH domain

SEQ ID NO: 4681 - protein, 160 aa, unidentified; identical to SEQ ID NO: 4609
  REGION 1..160: note = Description of Unknown: uncultivated organism with predicted taxonomy: Dialister
  REGION 1..160: note = MG15-119 HNH domain

SEQ ID NO: 4682 - protein, 160 aa, unidentified
  REGION 1..160: note = Description of Unknown: uncultivated organism with predicted taxonomy: Megasphaera micronuciformis
  REGION 1..160: note = MG15-120 HNH domain
ELAKSFDERQKMTKSIEENQSHNERIKERLQKEFNVPYPSGQDIVKLKLYEEQNETCAYSQKHIDAAKLFHDPNYAEVDHIIPYSRSFDDTYNNKVLVLTAENRQKGNRTPMEYLNGDEARKKQFVAWVKSDIKKPRKRENLLREKFTDDVENDWKERHL

SEQ ID NO: 4683 - protein, 160 aa, unidentified; identical to SEQ ID NO: 4577
  REGION 1..160: note = Description of Unknown: uncultivated organism with predicted taxonomy: Megasphaera micronuciformis
  REGION 1..160: note = MG15-121 HNH domain

SEQ ID NO: 4684 - protein, 160 aa, unidentified; identical to SEQ ID NO: 4586
  REGION 1..160: note = Description of Unknown: uncultivated organism with predicted taxonomy: Dialister invisus
  REGION 1..160: note = MG15-122 HNH domain

SEQ ID NO: 4685 - protein, 160 aa, unidentified; identical to SEQ ID NO: 4573
  REGION 1..160: note = Description of Unknown: uncultivated organism with predicted taxonomy: Megasphaera
  REGION 1..160: note = MG15-123 HNH domain

SEQ ID NO: 4686 - protein, 160 aa, unidentified
  REGION 1..160: note = Description of Unknown: uncultivated organism with predicted taxonomy: Dialister
  REGION 1..160: note = MG15-124 HNH domain
ELARNFRDRKKMEKGMQENQAKNEKIRQRLISEFGVLRPKGMDIVKFRLCEEQNGECAYSQKHFDMEKLLKDPSYAEVDHIIPYSRSFDDSYNNKVLVLTKENREKRNRIPMEYLADAPERKNRFIHWVKSTIRNSRKRENLLRTDYTATTENEWKRRNL

SEQ ID NO: 4687 - protein, 160 aa, unidentified; identical to SEQ ID NO: 4573
  REGION 1..160: note = Description of Unknown: uncultivated organism with predicted taxonomy: Dialister
  REGION 1..160: note = MG15-125 HNH domain

SEQ ID NO: 4688 - protein, 160 aa, unidentified
  REGION 1..160: note = Description of Unknown: uncultivated organism with predicted taxonomy: Megasphaera stantonii
  REGION 1..160: note = MG15-126 HNH domain
ELAKSFDERQKMTKSIEENQSHNERIKERLQKEFNVPYPSGQDIVKLKLYEEQNETCAYSQKHIDAAKLFHDPNYAEVDHIIPYSRSFDDTYNNKVLVLTAENRQKGNRTPMEYLSGDEARKKQFVAWVKSDIKKQRKRENLLREKFTADAENDWKARHL

SEQ ID NO: 4689 - protein, 160 aa, unidentified; identical to SEQ ID NO: 4608
  REGION 1..160: note = Description of Unknown: uncultivated organism with predicted taxonomy: Dialister
  REGION 1..160: note = MG15-127 HNH domain

SEQ ID NO: 4690 - protein, 160 aa, unidentified; identical to SEQ ID NO: 4608
  REGION 1..160: note = Description of Unknown: uncultivated organism with predicted taxonomy: Dialister invisus
  REGION 1..160: note = MG15-128 HNH domain

SEQ ID NO: 4691 - protein, 160 aa, unidentified; identical to SEQ ID NO: 4608
  REGION 1..160: note = Description of Unknown: uncultivated organism with predicted taxonomy: Dialister
  REGION 1..160: note = MG15-129 HNH domain

SEQ ID NO: 4692 - protein, 160 aa, unidentified; identical to SEQ ID NO: 4575
  REGION 1..160: note = Description of Unknown: uncultivated organism with predicted taxonomy: Dialister
  REGION 1..160: note = MG15-130 HNH domain

SEQ ID NO: 4693 - protein, 160 aa, unidentified; identical to SEQ ID NO: 4586
  REGION 1..160: note = Description of Unknown: uncultivated organism with predicted taxonomy: Dialister
  REGION 1..160: note = MG15-131 HNH domain

SEQ ID NO: 4694 - protein, 160 aa, unidentified; identical to SEQ ID NO: 4604
  REGION 1..160: note = Description of Unknown: uncultivated organism with predicted taxonomy: Veillonella magna
  REGION 1..160: note = MG15-132 HNH domain

SEQ ID NO: 4695 - protein, 160 aa, unidentified; identical to SEQ ID NO: 4565
  REGION 1..160: note = Description of Unknown: uncultivated organism with predicted taxonomy: Dialister
  REGION 1..160: note = MG15-133 HNH domain

SEQ ID NO: 4696 - protein, 160 aa, unidentified; identical to SEQ ID NO: 4577
  REGION 1..160: note = Description of Unknown: uncultivated organism with predicted taxonomy: Megasphaera micronuciformis
  REGION 1..160: note = MG15-134 HNH domain

SEQ ID NO: 4697 - protein, 160 aa, unidentified; identical to SEQ ID NO: 4580
  REGION 1..160: note = Description of Unknown: uncultivated organism with predicted taxonomy: Megasphaera micronuciformis
  REGION 1..160: note = MG15-135 HNH domain

SEQ ID NO: 4698 - protein, 160 aa, unidentified; identical to SEQ ID NO: 4586
  REGION 1..160: note = Description of Unknown: uncultivated organism with predicted taxonomy: Megasphaera stantonii
  REGION 1..160: note = MG15-136 HNH domain

SEQ ID NO: 4699 - protein, 160 aa, unidentified; identical to SEQ ID NO: 4603
  REGION 1..160: note = Description of Unknown: uncultivated organism with predicted taxonomy: Megasphaera sp. AM44-1BH
  REGION 1..160: note = MG15-137 HNH domain

SEQ ID NO: 4700 - protein, 159 aa, unidentified
  REGION 1..159: note = Description of Unknown: uncultivated organism with predicted taxonomy: Megasphaera
  REGION 1..159: note = MG15-138 HNH domain
ELAKNAKERTELEKAMKDNQSRNEEIKTKLHELNVMQPTGLDIVKYKLYEQQQGDCAYSQKKFDVDRLLHDSTYAEVDHIIPYSRSFDDTYRNKVLVLTKENRDKGNRTPMEYFQDKPERKEAFVRWVKRTISDGKKRNNLLRVNYSADAEKEWKDRHL

SEQ ID NO: 4701 - protein, 159 aa, unidentified
  REGION 1..159: note = Description of Unknown: uncultivated organism with predicted taxonomy: Megasphaera
  REGION 1..159: note = MG15-139 HNH domain
ELAKSAKERTELEKAMKDNQSRNEEIKTKLHELNVMQPTGLDIVKYKLYEQQQGDCAYSQKKFDVNRLLHDPTYAEVDHIIPYSRSFDDTYRNKVLVLTKENRDKGNRTPMEYFQDKPERKEAFINWVKRTISDGKKRNNLLRVNYSADAEKEWKDRHL

SEQ ID NO: 4702 - protein, 160 aa, unidentified; identical to SEQ ID NO: 4603
  REGION 1..160: note = Description of Unknown: uncultivated organism with predicted taxonomy: Megasphaera sp. AM44-1BH
  REGION 1..160: note = MG15-140 HNH domain

SEQ ID NO: 4703 - protein, 160 aa, unidentified; identical to SEQ ID NO: 4608
  REGION 1..160: note = Description of Unknown: uncultivated organism with predicted taxonomy: Dialister
  REGION 1..160: note = MG15-141 HNH domain

SEQ ID NO: 4704 - protein, 160 aa, unidentified; identical to SEQ ID NO: 4603
  REGION 1..160: note = Description of Unknown: uncultivated organism with predicted taxonomy: Megasphaera sp. AM44-1BH
  REGION 1..160: note = MG15-142 HNH domain

SEQ ID NO: 4705 - protein, 160 aa, unidentified; identical to SEQ ID NO: 4574
  REGION 1..160: note = Description of Unknown: uncultivated organism with predicted taxonomy: Megasphaera micronuciformis
  REGION 1..160: note = MG15-143 HNH domain

SEQ ID NO: 4706 - protein, 160 aa, unidentified; identical to SEQ ID NO: 4655
  REGION 1..160: note = Description of Unknown: uncultivated organism with predicted taxonomy: Megasphaera stantonii
  REGION 1..160: note = MG15-144 HNH domain

SEQ ID NO: 4707 - protein, 160 aa, unidentified; identical to SEQ ID NO: 4577
  REGION 1..160: note = Description of Unknown: uncultivated organism with predicted taxonomy: Megasphaera stantonii
  REGION 1..160: note = MG15-145 HNH domain

SEQ ID NO: 4708 - protein, 160 aa, unidentified
  REGION 1..160: note = Description of Unknown: uncultivated organism with predicted taxonomy: Megasphaera stantonii
  REGION 1..160: note = MG15-146 HNH domain
EMGRSFQERRDMMKSMEDNNAANEKLKEEIKKDYGIAHPNGLDIVKYKLFKEQGERCAYSLKPMDARQVLKDPSYAEVDHILPYSRSFDDSYANKVLVLAKENRDKGNRTPMEYMANLPERKHAFITWVKSNVRNPKKRDNLLLEKFDGDKEDAWKERHL

SEQ ID NO: 4709 - protein, 158 aa, unidentified
  REGION 1..158: note = Description of Unknown: uncultivated organism with predicted taxonomy: Selenomonas ruminantium
  REGION 1..158: note = MG15-147 HNH domain
EMARSKKDRDAMTTSMEKNRAENETIKRELMEKGLLSPKGLDIVKWKLYKEQQGVCAYSQKVIDVERLLHEGTYAEVDHILPYSRSFDDSYRNKVLVLTEENRKKGNRTPMEYFADMPERKHAFVTWCKGNIRDFKKREHLLKENYDREDAGWKDRHL

SEQ ID NO: 4710 - protein, 158 aa, unidentified
  REGION 1..158: note = Description of Unknown: uncultivated organism with predicted taxonomy: Selenomonas sp. AE3005
  REGION 1..158: note = MG15-148 HNH domain
EMARNFQDRRDMQHKMEDNRKANERIIQELRENGLLQPNGLDIVKWKLYKEQQGICAYSQKPFDVERLLHDGKYAEVDHILPYSRSLDDSYANKVLVMAGENQLKRNRTPLEYMADDEEKLNAFVCWANTSIRDLRKRQNLLRKNFHSEEKEWKDRHL

SEQ ID NO: 4711 - protein, 158 aa, unidentified
  REGION 1..158: note = Description of Unknown: uncultivated organism with predicted taxonomy: Selenomonas ruminantium
  REGION 1..158: note = MG15-149 HNH domain
EMARSKTDRDAMTSSMEKNRAANEKVKKELMEKGLLSPKGLDIVKWKLYKEQQGVCAYSQKVIDVERLLHEGTYAEVDHILPYSRSFDDSYRNKVLVLTEENRKKGNRTPMEYFADMPERKHAFVTWCKGNIRDFKKREHLLKENYDREDAGWKDRHL

SEQ ID NO: 4712 - protein, 159 aa, unidentified
  REGION 1..159: note = Description of Unknown: uncultivated organism with predicted taxonomy: Selenomonas ruminantium
  REGION 1..159: note = MG15-150 HNH domain
EMGRTFQERREMMKSMEDNNTKNEKLKEELKDYGVAHPSGLDIVKLKLYKEQGGVCAYSLAAMPIEKVLNDYDYAEVDHILPYSRSFDDSYANKVLVLAKENRDKGNRTPMEYMEKTPGKKHDFVTWVKASVRNPKKRDNLLLEKFDEDKEAAWKERHL

SEQ ID NO: 4713 - protein, 158 aa, unidentified
  REGION 1..158: note = Description of Unknown: uncultivated organism with predicted taxonomy: Selenomonas sp. AE3005
  REGION 1..158: note = MG15-151 HNH domain
EMARNFQDRRDMRHKMEDNRKANERIIQELRENGLLQPNGLDIVKWKLYKEQQGICAYSQKPFDVERLLHDGKYAEVDHILPYSRSLDDSYANKVLVMAGENQLKRNRTPLEYMADDEEKLNAFVCWANTSIRDLRKRQNLLRKNFHSEEKEWKDRHL

SEQ ID NO: 4714 - protein, 162 aa, unidentified
  REGION 1..162: note = Description of Unknown: uncultivated organism with predicted taxonomy: Selenomonas sp. AE3005
  REGION 1..162: note = MG15-152 HNH domain
EMARSFQDRKDMHNKMENNRKANEQIIKELRENGLLQPNGLDIVKWKLYKEQQGVCAYSQKTFDVERLLHDGKYDGKYAEVDHILPYSRSFDDSYTNKVLVMAGENQHKGNRTPWEYMRDNEEKWTSFACWTNTAIRDFRKRQNLLRKNFCSEEKEWKERHL

SEQ ID NO: 4715 - protein, 158 aa, unidentified
  REGION 1..158: note = Description of Unknown: uncultivated organism with predicted taxonomy: Selenomonas sp. AE3005
  REGION 1..158: note = MG15-153 HNH domain
EMARSFQDRRDMHNKMENNRKANEQIIKELRENGLLQPNGLDIVKWKLYKEQQGICAYSQKTFDVERLLHDGKYAEVDHILPYSRSFDDSYTNKVLVMAGENQHKGNRTPWEYMRDNEEKWTSFACWTNTAIRDFRKRQNLLRKNFCSEEKEWKERHL

SEQ ID NO: 4716 - protein, 158 aa, unidentified; identical to SEQ ID NO: 4711
  REGION 1..158: note = Description of Unknown: uncultivated organism with predicted taxonomy: Selenomonas ruminantium
  REGION 1..158: note = MG15-154 HNH domain

SEQ ID NO: 4717 - protein, 158 aa, unidentified
  REGION 1..158: note = Description of Unknown: uncultivated organism with predicted taxonomy: Selenomonas sp. AE3005
  REGION 1..158: note = MG15-155 HNH domain
EMARSFQDRKDMHNKMENNRKANEQIIKELRENGLLQPNGLDIVKWKLYKEQQGVCAYSQKTFDVERLLHDGKYAEVDHILPYSRSFDDSYTNKVLVMAGENQHKGNRTPWEYMSNNEEKWTAFACWTNTAIRDFRKRQNLLRKKFCSEEKEWKERHL

SEQ ID NO: 4718 - protein, 158 aa, unidentified
  REGION 1..158: note = Description of Unknown: uncultivated organism with predicted taxonomy: Selenomonas sp. AE3005
  REGION 1..158: note = MG15-156 HNH domain
EMARNFQDRRDMQHKMEDNRKANERIIQELRENGLLQPNGLDIVKWKLYKEQQGICAYSQKPFDVERLLHDGKYAEVDHILPYSRSLDDSYANKVLVMAGENQLKRNRTPLEYMADDEEKQNAFVCWANTSIRDLRKRQNLLRKNFHSEEKEWKDRHL

SEQ ID NO: 4719 - protein, 159 aa, unidentified
  REGION 1..159: note = Description of Unknown: uncultivated organism with predicted taxonomy: Megasphaera stantonii
  REGION 1..159: note = MG15-157 HNH domain
EMGRSFQERRDMMKSMEDNNAENEKRKEELKGYGVAHPNGLDIVKLKLYKEQGGVCAYSLAAMPIEKVLKDPSYAEVDHILPYSRSFDDSYANKVLVLAKENRDKGNRTPMEYMANLPERKHAFITWVKSNVRNPKKRDNLLLEKFDGDKEDAWKERHL

SEQ ID NO: 4720 - protein, 158 aa, unidentified; identical to SEQ ID NO: 4711
  REGION 1..158: note = Description of Unknown: uncultivated organism with predicted taxonomy: Selenomonas ruminantium
  REGION 1..158: note = MG15-158 HNH domain

SEQ ID NO: 4721 - protein, 158 aa, unidentified; identical to SEQ ID NO: 4711
  REGION 1..158: note = Description of Unknown: uncultivated organism with predicted taxonomy: Selenomonas ruminantium
  REGION 1..158: note = MG15-159 HNH domain

SEQ ID NO: 4722 - protein, 159 aa, unidentified; identical to SEQ ID NO: 4719
  REGION 1..159: note = Description of Unknown: uncultivated organism with predicted taxonomy: Megasphaera stantonii
  REGION 1..159: note = MG15-160 HNH domain

SEQ ID NO: 4723 - protein, 160 aa, unidentified; identical to SEQ ID NO: 4600
  REGION 1..160: note = Description of Unknown: uncultivated organism with predicted taxonomy: Selenomonas sp. AE3005
  REGION 1..160: note = MG15-161 HNH domain

SEQ ID NO: 4724 - protein, 160 aa, unidentified
  REGION 1..160: note = Description of Unknown: uncultivated organism with predicted taxonomy: Megasphaera
  REGION 1..160: note = MG15-162 HNH domain
ELAKNFRDRKKMEKGMQENQAKNEKIRQRLMSEFGVLRPKGMDIVKFKLCEEQNGECAYSQKHFDMEKLLRDPSYAEVDHIIPYSRSFDDSYNNKVLVLTKENREKRNRIPMEYLADATERKNRFIHWVKSTIRNSRKRENLLRIDYTETTENEWKRRNL

SEQ ID NO: 4725 - protein, 160 aa, unidentified
  REGION 1..160: note = Description of Unknown: uncultivated organism with predicted taxonomy: Megasphaera stantonii
  REGION 1..160: note = MG15-163 HNH domain
ELARNFRDRKKMEKGMQENQAKNEKIRQRLISEFGVLRPKGMDIVKFKLCEEQNGECAYSQKHFDMEKLLKDPSYAEVDHIIPYSRSFDDSYNNKVLVLTKENREKRNRIPMEYLADAPERKNRFIHWVKSTIWNSRKRENLLRIDYTETTENEWKRRNL

SEQ ID NO: 4726 - protein, 160 aa, unidentified
  REGION 1..160: note = Description of Unknown: uncultivated organism with predicted taxonomy: Megasphaera
  REGION 1..160: note = MG15-164 HNH domain
ELARNFRDRKKMEKGMQENQAKNEKIRQRLISEFGVLRPKGMDIVKFKLCEEQNGECAYSQKHFDMEKLLRDPSYAEVDHIIPYSRSFDDSYNNKVLVLTKENREKRNRIPMEYLADAPERKNRFIHWVKSTIRNSRKRENLLRTDYTATTENEWKRRNL

SEQ ID NO: 4727 - protein, 160 aa, unidentified; identical to SEQ ID NO: 4565
  REGION 1..160: note = Description of Unknown: uncultivated organism with predicted taxonomy: Megasphaera stantonii
  REGION 1..160: note = MG15-165 HNH domain

SEQ ID NO: 4728 - protein, 160 aa, unidentified
  REGION 1..160: note = Description of Unknown: uncultivated organism with predicted taxonomy: Bacteroidales
  REGION 1..160: note = MG16-2 HNH domain
ELKQSREERELTDKNNRNRQKENDSNAKLIEEYGIRASRNRIQKYRMWKESRQTCFYCGQVVDVKDFLRGYDVEVEHIIPKALFFDDSFSNKVCSCRKCNSEKGERTAYDYMSSKGEDELNRYIRTVEDRCKKGEISKTKRERLLTPADKIPTDFINRQL

SEQ ID NO: 4729 - protein, 160 aa, unidentified
  REGION 1..160: note = Description of Unknown: uncultivated organism with predicted taxonomy: Bacteroidales
  REGION 1..160: note = MG16-5 HNH domain
ELKSSKDEREAAFKRNNENERQNKIYENRIREYGIQPSRSRIQKYKMWEESNHLCFYCGKPVNVTDFLAGAEVEIEHIIPQSVLFDDSYSNKVCACRACNQAKGNLTAREFMEKHSKEEYDSYLRRVDDAFNAHRISKTKRDHLLWRKEDIPQDFIDRQL

SEQ ID NO: 4730 - protein, 160 aa, unidentified; identical to SEQ ID NO: 4729
  REGION 1..160: note = Description of Unknown: uncultivated organism with predicted taxonomy: Bacteroidetes
  REGION 1..160: note = MG16-6 HNH domain

SEQ ID NO: 4731 - protein, 160 aa, unidentified
  REGION 1..160: note = Description of Unknown: uncultivated organism with predicted taxonomy: Bacteroides
  REGION 1..160: note = MG16-7 HNH domain
ELKLSQEARATTAKSIRDREKINLEYAGKIREFGIVPSKNKILKYRLWEEAGQRCFYCGQTISAQEFLSGFDSDIEHIIPKSRLFDDSYSNKACSCRKCNSTKNNMTAYDFMKAQGEDKFKDYCDRVANAYKEGKISRTKRDRFMTPAEKIPKDFISRQL

SEQ ID NO: 4732 - protein, 160 aa, unidentified; identical to SEQ ID NO: 4731
  REGION 1..160: note = Description of Unknown: uncultivated organism with predicted taxonomy: Bacteroides
  REGION 1..160: note = MG16-8 HNH domain

SEQ ID NO: 4733 - protein, 160 aa, unidentified; identical to SEQ ID NO: 4731
  REGION 1..160: note = Description of Unknown: uncultivated organism with predicted taxonomy: Bacteroides sp. CAG:770
  REGION 1..160: note = MG16-9 HNH domain

SEQ ID NO: 4734 - protein, 160 aa, unidentified; identical to SEQ ID NO: 4731
  REGION 1..160: note = Description of Unknown: uncultivated organism with predicted taxonomy: Bacteroides
  REGION 1..160: note = MG16-10 HNH domain

SEQ ID NO: 4735 - protein, 160 aa, unidentified; identical to SEQ ID NO: 4731
  REGION 1..160: note = Description of Unknown: uncultivated organism with predicted taxonomy: Bacteroides
  REGION 1..160: note = MG16-11 HNH domain

SEQ ID NO: 4736 - protein, 160 aa, unidentified; identical to SEQ ID NO: 4729
  REGION 1..160: note = Description of Unknown: uncultivated organism with predicted taxonomy: Bacteroidetes
  REGION 1..160: note = MG16-12 HNH domain

SEQ ID NO: 4737 - protein, 160 aa, unidentified; identical to SEQ ID NO: 4731
  REGION 1..160: note = Description of Unknown: uncultivated organism with predicted taxonomy: Bacteroides
  REGION 1..160: note = MG16-13 HNH domain

SEQ ID NO: 4738 - protein, 160 aa, unidentified; identical to SEQ ID NO: 4731
  REGION 1..160: note = Description of Unknown: uncultivated organism with predicted taxonomy: Bacteroides sp. CAG:770
  REGION 1..160: note = MG16-14 HNH domain

SEQ ID NO: 4739 - protein, 160 aa, unidentified
  REGION 1..160: note = Description of Unknown: uncultivated organism with predicted taxonomy: Bacteroides sp. CAG:770
  REGION 1..160: note = MG16-15 HNH domain
ELKLSKEGRAATAKNIRDREKMNNEMAEKIKELGITPSKNKILKYRLWQESGQKCFYCGQPVGAAEFLSGLDVEIEHIVPKALLFDDSFSNKVCACRKCNAEKSNTTAYDYMKSKGENEFNDYLRRVDAAFNEHKISFTKRSRLLTPTDKLPKDFISRQL

SEQ ID NO: 4740 - protein, 160 aa, unidentified
  REGION 1..160: note = Description of Unknown: uncultivated organism with predicted taxonomy: Bacteroides sp. CAG:709
  REGION 1..160: note = MG16-16 HNH domain
ELKLSKEGRAATAKNIRDREKENKEIADKIIELGVTPSKNKILKYRLWQEAGQKCFYCGQPVGATEFLNGLDVEIEHVVPKALLFDDSFSNKVCACRKCNAEKRNSTAYDYMKSKGENAFNDYLRRVDTAFSEHKISFTKRSRLLTPADKIPKDFISRQL

SEQ ID NO: 4741 - protein, 160 aa, unidentified
  REGION 1..160: note = Description of Unknown: uncultivated organism with predicted taxonomy: Bacteroides sp. CAG:770
  REGION 1..160: note = MG16-17 HNH domain
ELKLSKEGRAATAKNIRDREKMNNEMAEKIKELGITPSKNKILKYRLWQESGQKCFYCGQPVGAAEFLSGLDVEIEHIVPKALLFDDSFSNKVCACRKCNAEKSNTTAYDYMKSKGENEFNDYLRRVDAAFNEHKISFTKRSRLLTPADKLPKDFISRQL

SEQ ID NO: 4742 - protein, 160 aa, unidentified
  REGION 1..160: note = Description of Unknown: uncultivated organism with predicted taxonomy: Bacteroides sp. CAG:770
  REGION 1..160: note = MG16-18 HNH domain
ELKLSKEGRESAAKNIRAREKANEEIARRIEELGLVPSKNKILKYRLWEESGKRCFYCGQPVSAAEFLNGLDVEIEHVIPKSLLFDDSFSNKVCACRKCNAEKDNATAFDFMKGRGENAFEDYLKRVETAFKENRISQTKKNRLLTPADKIPKDFISRQL

SEQ ID NO: 4743 - protein, 160 aa, unidentified
  REGION 1..160: note = Description of Unknown: uncultivated organism with predicted taxonomy: Bacteroides sp. CAG:770
  REGION 1..160: note = MG16-19 HNH domain
ELKLSKAGRESAANNIRTRKKVNEEIAKRIEELGLVPSKNKILKYRLWEESGKRCFYCGQPVSATEFLNGLDVEIEHVVPKSLLFDDSFSNKVCACRKCNAEKGNATAFDFMKGRGENAFEDYLKRVETAFKENTISQTKRNRLLTPADKIPKDFIARQL

SEQ ID NO: 4744 - protein, 160 aa, unidentified
  REGION 1..160: note = Description of Unknown: uncultivated organism with predicted taxonomy: Bacteroides sp. CAG:770
  REGION 1..160: note = MG16-20 HNH domain
ELKLSKEGRAATAKNIRDREKMNNEMAEKIKELGITPSKNKILKYRLWQESGQKCFYCGQPVGAAEFLSGLDVEIEHIVPKALLFDDSFSNKVCACRKCNAEKSNTTAYDYMKSKGENEFNDYLRRVDAAFNEHKISFTKRSRLLTPANKLPKDFISRQL

SEQ ID NO: 4745 - protein, 160 aa, unidentified
  REGION 1..160: note = Description of Unknown: uncultivated organism with predicted taxonomy: Bacteroides sp. CAG:770
  REGION 1..160: note = MG16-21 HNH domain
ELKLSKAGRESAAKNVRTREKANEEIAKRIEELGLVPSKNKILKYRLWEESGKRCFYCGQPVSATEFLNGLDVEIEHVVPKSLLFDDSFSNKVCACRKCNAEKGNATAFDFMKGRGENAFEDYLKRVETAFKENKISQTKRNRLLTPADKIPKDFISRQL

SEQ ID NO: 4746 - protein, 160 aa, unidentified
  REGION 1..160: note = Description of Unknown: uncultivated organism with predicted taxonomy: Bacteroides sp. CAG:770
  REGION 1..160: note = MG16-22 HNH domain
ELKLSKSGRESAAKNIRTREKANEEIAKRIEELGLVPSKNKILKYRLWEESGKRCFYCGQPVSATEFLNGLDVEIEHVVPKSLLFDDSFSNKVCACRKCNAEKGNATAFDFMKGRGENAFEDYLKRVETAFKENKISQTKRNRLLTPADKIPKDFIARQL

SEQ ID NO: 4747 - protein, 160 aa, unidentified
  REGION 1..160: note = Description of Unknown: uncultivated organism with predicted taxonomy: Bacteroidales
  REGION 1..160: note = MG16-23 HNH domain
ELKLSKEGRAATAKNIRDREKMNNEMAEKIKELGITPSKNKILKYRLWQESGQKCFYCGQPVGAAEFLSGLDVEIEHIVPKALLFDDSFSNKVCACRKCNAEKSNTTAYDYMKSKGENEFNDYLRRVDAAFNEHKISFTKRSRLLSPADKLPKDFISRQL

SEQ ID NO: 4748 - protein, 160 aa, unidentified; identical to SEQ ID NO: 4741
  REGION 1..160: note = Description of Unknown: uncultivated organism with predicted taxonomy: Bacteroides sp. CAG:770
  REGION 1..160: note = MG16-24 HNH domain

SEQ ID NO: 4749 - protein, 160 aa, unidentified
  REGION 1..160: note = Description of Unknown: uncultivated organism with predicted taxonomy: Bacteroides sp. CAG:770
  REGION 1..160: note = MG16-25 HNH domain
ELKLSKEGRESAAKNIRAREKANEEIARRIEELGLVPSKNKILKYRLWEESVKRCFYCGQPVSAAEFLNGLDVEIEHVIPKSLLFDDSFSNKVCACRKCNAEKDNATAFDFMKGRGENAFEDYLKRVETAFKENRISQTKKNRLLTPADKIPKDFISRQL

SEQ ID NO: 4750 - protein, 160 aa, unidentified; identical to SEQ ID NO: 4741
  REGION 1..160: note = Description of Unknown: uncultivated organism with predicted taxonomy: Bacteroides
  REGION 1..160: note = MG16-26 HNH domain

SEQ ID NO: 4751 - protein, 160 aa, unidentified
  REGION 1..160: note = Description of Unknown: uncultivated organism with predicted taxonomy: Bacteroides sp. CAG:770
  REGION 1..160: note = MG16-27 HNH domain
ELKLSKAGRESAAKNIRTREKANEEIAKRIEELGLVPSKNKILKYRLWEESGKRCFYCGQPVSATEFLNGLDVEIEHIVPKSLLFDDSFSNKVCACRKCNAEKGNATAFDYMKGRGENAFEDYLKRVEAAFKENKISQTKRNRLLTPADKIPKDFISRQL

SEQ ID NO: 4752 - protein, 160 aa, unidentified; identical to SEQ ID NO: 4741
  REGION 1..160: note = Description of Unknown: uncultivated organism with predicted taxonomy: Bacteroides sp. CAG:545
  REGION 1..160: note = MG16-28 HNH domain

SEQ ID NO: 4753 - protein, 160 aa, unidentified
  REGION 1..160: note = Description of Unknown: uncultivated organism with predicted taxonomy: Bacteroides sp. CAG:709
  REGION 1..160: note = MG16-29 HNH domain
ELKLSKEGRAATAKNIRDREKENKEIAEKIIELGVTPSKNKILKYRLWQEAGQKCFYCGQPVGATEFLNGLDVEIEHVVPKALLFDDSFSNKVCACRKCNAEKRKSTAYDYMKSKGENAFNDYLRRVDTAFSEHKISFTKRSRLLTPADKIPKDFISRQL

SEQ ID NO: 4754 - protein, 160 aa, unidentified
  REGION 1..160: note = Description of Unknown: uncultivated organism with predicted taxonomy: Bacteroides sp. CAG:709
  REGION 1..160: note = MG16-30 HNH domain
ELKLSKEGRAATAKNIRDREKENKEIAEKIIELGVTPSKNKILKYRLWQEAGQKCFYCGQPVGATEFLNGLDVEIEHVVPKALLFDDSFSNKVCACRKCNAEKRNSTAYDYMKSKGENAFNDYLRRVDTAFSEHKISFTKRSRLLTPADKIPKDFISRQL

SEQ ID NO: 4755 - protein, 160 aa, unidentified; identical to SEQ ID NO: 4754
  REGION 1..160: note = Description of Unknown: uncultivated organism with predicted taxonomy: Bacteroides sp. CAG:709
  REGION 1..160: note = MG16-31 HNH domain

SEQ ID NO: 4756 - protein, 160 aa, unidentified
  REGION 1..160: note = Description of Unknown: uncultivated organism with predicted taxonomy: Alistipes sp. CAG:514
  REGION 1..160: note = MG16-32 HNH domain
ELKLSKEGRAATAKNIRDREKQNNEIAEKIKELGITPSKNKILKYRLWQESGQKCFYCGQPVGAAEFLNGLDVEIEHIVPKALLFDDSFSNKVCACRRCNAEKSNLTAYDYMKSKGENEFNDYLRRVDAAFNDHKISFTKRSRLLTPADKLPKDFILRQL

SEQ ID NO: 4757 - protein, 160 aa, unidentified; identical to SEQ ID NO: 4756
  REGION 1..160: note = Description of Unknown: uncultivated organism with predicted taxonomy: Alistipes sp. CAG:514
  REGION 1..160: note = MG16-33 HNH domain

SEQ ID NO: 4758 - protein, 160 aa, unidentified; identical to SEQ ID NO: 4741
  REGION 1..160: note = Description of Unknown: uncultivated organism with predicted taxonomy: Bacteroides sp. CAG:545
  REGION 1..160: note = MG16-34 HNH domain

SEQ ID NO: 4759 - protein, 160 aa, unidentified; identical to SEQ ID NO: 4742
  REGION 1..160: note = Description of Unknown: uncultivated organism with predicted taxonomy: Bacteroides sp. CAG:770
  REGION 1..160: note = MG16-35 HNH domain

SEQ ID NO: 4760 - protein, 160 aa, unidentified; identical to SEQ ID NO: 4741
  REGION 1..160: note = Description of Unknown: uncultivated organism with predicted taxonomy: Bacteroides
  REGION 1..160: note = MG16-36 HNH domain

SEQ ID NO: 4761 - protein, 160 aa, unidentified; identical to SEQ ID NO: 4741
  REGION 1..160: note = Description of Unknown: uncultivated organism with predicted taxonomy: Bacteroides sp. CAG:545
  REGION 1..160: note = MG16-37 HNH domain

SEQ ID NO: 4762 - protein, 160 aa, unidentified; identical to SEQ ID NO: 4741
  REGION 1..160: note = Description of Unknown: uncultivated organism with predicted taxonomy: Bacteroides
  REGION 1..160: note = MG16-38 HNH domain

SEQ ID NO: 4763 - protein, 160 aa, unidentified
  REGION 1..160: note = Description of Unknown: uncultivated organism with predicted taxonomy: Bacteroides sp. CAG:770
  REGION 1..160: note = MG16-39 HNH domain
ELKLSKAGRESAAKNVRTREKANEEIAKRIEELGLVPSKNKILKYRLWEESGKRCFYCGQPVSATEFLNGLDVEIEHVVPKSLLFDDSFSNKVCACRKCNAEKGNATAFDFMKGRGENAFEDYLKRVETAFKENKISQTKRNRLLTPADKIPKDFIARQL

SEQ ID NO: 4764 - protein, 160 aa, unidentified; identical to SEQ ID NO: 4754
  REGION 1..160: note = Description of Unknown: uncultivated organism with predicted taxonomy: Bacteroides sp. CAG:770
  REGION 1..160: note = MG16-40 HNH domain

SEQ ID NO: 4765 - protein, 160 aa, unidentified
  REGION 1..160: note = Description of Unknown: uncultivated organism with predicted taxonomy: Bacteroides sp. CAG:770
  REGION 1..160: note = MG16-42 HNH domain
ELKLSKEGRESAAKNIRAREKANEEIAKRIEELGLLPSKNKILKYRLWEESGKRCFYCGQPVSATEFLNGLDVEIEHVVPKSLLFDDSFSNKVCACRKCNAEKGNATAFDFMNGRGENAFEDYLKRVETAFKENKISQTKRNRLLTPADKIPKDFISRQL

SEQ ID NO: 4766 - protein, 160 aa, unidentified; identical to SEQ ID NO: 4765
  REGION 1..160: note = Description of Unknown: uncultivated organism with predicted taxonomy: Bacteroides sp. CAG:770
  REGION 1..160: note = MG16-43 HNH domain

SEQ ID NO: 4767 - protein, 160 aa, unidentified
  REGION 1..160: note = Description of Unknown: uncultivated organism with predicted taxonomy: Bacteroides sp. CAG:770
  REGION 1..160: note = MG16-44 HNH domain
ELKLSKSGRESAAKNIRTREKANEEIAKRIEELGLVPSKNKILKYRLWEESGKRCFYCGQPVSATEFLNGLDVEIEHVVPKSLLFDNSFSNKVCACRKCNAEKGNATAFDFMKGRGENAFEDYLKRVETAFKENKISQTKRNRLLTPADKIPKDFISRQL

SEQ ID NO: 4768 - protein, 160 aa, unidentified; identical to SEQ ID NO: 4742
  REGION 1..160: note = Description of Unknown: uncultivated organism with predicted taxonomy: Bacteroides sp. CAG:770
  REGION 1..160: note = MG16-45 HNH domain

SEQ ID NO: 4769 - protein, 160 aa, unidentified
  REGION 1..160: note = Description of Unknown: uncultivated organism with predicted taxonomy: Bacteroides sp. CAG:770
  REGION 1..160: note = MG16-46 HNH domain
ELKLSKEGRAATAKNLRDREKMNNEMAEKIKELGITPSKNKILKYRLWQESGQKCFYCGQPVGAAEFLSGLDVEIEHIVPKALLFDDSFSNKVCACRKCNAEKSNTTAYDYMKSKGENEFNDYLRRVDAAFNEHKISFTKRSRLLTPADKLPKDFISRQL

SEQ ID NO: 4770 - protein, 160 aa, unidentified
  REGION 1..160: note = Description of Unknown: uncultivated organism with predicted taxonomy: Bacteroides sp. CAG:709
  REGION 1..160: note = MG16-47 HNH domain
ELKLSKEGRAATAKNIRDREKENKEIAEKIIELGVTPSKNKILKYRLWQEAGQKCFYCGQPVGATEFLNGLDVEIEHVVPKALLFDDSFSNKVCACRKCNAEKRNSTAYDYMKSKGENAFNDYLRRVDTAFSEHRISFTKRSRLLTPADKIPKDFISRQL

SEQ ID NO: 4771 - protein, 160 aa, unidentified
  REGION 1..160: note = Description of Unknown: uncultivated organism with predicted taxonomy: Bacteroides sp. CAG:770
  REGION 1..160: note = MG16-48 HNH domain
ELKLSKAGRESAAKNIRTREKANEEIAKRIEELGLVPSKNKILKYRLWEESGKRCFYCGQPVSATEFLNGLDVEIEHVVPKSLLFDDSFSNKVCACRKCNAEKGNATAFDFMKGRGENAFEDYLKRVETAFKENKISQTKRNRLLTPADKIPKDFISRQL

SEQ ID NO: 4772 - protein, 160 aa, unidentified; identical to SEQ ID NO: 4771
  REGION 1..160: note = Description of Unknown: uncultivated organism with predicted taxonomy: Bacteroides sp. CAG:770
  REGION 1..160: note = MG16-50 HNH domain

SEQ ID NO: 4773 - protein, 160 aa, unidentified; identical to SEQ ID NO: 4771
  REGION 1..160: note = Description of Unknown: uncultivated organism with predicted taxonomy: Bacteroides sp. CAG:770
  REGION 1..160: note = MG16-51 HNH domain

SEQ ID NO: 4774 - protein, 160 aa, unidentified; identical to SEQ ID NO: 4763
  REGION 1..160: note = Description of Unknown: uncultivated organism with predicted taxonomy: Bacteroides sp. CAG:770
  REGION 1..160: note = MG16-52 HNH domain

SEQ ID NO: 4775 - protein, 160 aa, unidentified; identical to SEQ ID NO: 4754
  REGION 1..160: note = Description of Unknown: uncultivated organism with predicted taxonomy: Bacteroides sp. CAG:709
  REGION 1..160: note = MG16-53 HNH domain

SEQ ID NO: 4776 - protein, 160 aa, unidentified; identical to SEQ ID NO: 4754
  REGION 1..160: note = Description of Unknown: uncultivated organism with predicted taxonomy: Bacteroides sp. CAG:709
  REGION 1..160: note = MG16-54 HNH domain

SEQ ID NO: 4777 - protein, 160 aa, unidentified
  REGION 1..160: note = Description of Unknown: uncultivated organism with predicted taxonomy: Bacteroides sp. CAG:770
  REGION 1..160: note = MG16-55 HNH domain
ELKLSKEGRESAAKNISDRKKANEEIARRIEELGLVPSKNKILKYRLWEESGKRCFYCGQPVSATEFLNGLDVEIEHVIPKSLLFDDSFSNKVCACRKCNAEKGNATAFDFMKGRGENAFEDYLKRVETAFKENRISQTKRSRLLTPADKIPKDFISRQL

SEQ ID NO: 4778 - protein, 160 aa, unidentified
  REGION 1..160: note = Description of Unknown: uncultivated organism with predicted taxonomy: Bacteroides sp. CAG:545
  REGION 1..160: note = MG16-56 HNH domain
KLKLSKEGRAATAKNIRDREKMNNEMAEKIKELGITPSKNKILKYRLWQESGQKCFYCGQPVGAAEFLSGLDVEIEHIVPKALLFDDSFSNKVCACRKCNAEKSNTTAYDYMKSKGENEFNDYLRRVDAAFNEHKISFTKRSRLLTPADKLPKDFISRQL

SEQ ID NO: 4779 - protein, 160 aa, unidentified; identical to SEQ ID NO: 4743
  REGION 1..160: note = Description of Unknown: uncultivated organism with predicted taxonomy: Bacteroides sp. CAG:770
  REGION 1..160: note = MG16-57 HNH domain

SEQ ID NO: 4780 - protein, 160 aa, unidentified
  REGION 1..160: note = Description of Unknown: uncultivated organism with predicted taxonomy: Bacteroides sp. CAG:770
  REGION 1..160: note = MG16-58 HNH domain
ELKLSKAGRESAAKNIRTREKANEEIAKRIEELDLVPSKNKILKYRLWEESGKRCFYCGQPVSATEFLNGLDVEIEHIVPKSLLFDDSFSNKVCACRKCNAEKGNATAFDFMKGRGENAFEDYLKRVETAFKENKISQTKRNRLLTPADKIPKDFIARQL

SEQ ID NO: 4781 - protein, 160 aa, unidentified
  REGION 1..160: note = Description of Unknown: uncultivated organism with predicted taxonomy: Bacteroides sp. CAG:770
  REGION 1..160: note = MG16-59 HNH domain
ELKLSKEGRAATAKNIRDREKMNNEMAEKIKELGITPSKNKILKYRLWQESGQKCFYCGQPVGAAEFLSGLDVEIEHIVPKALLFDDSFSNKVCACRKCNAEKSNNTAYDYMKSKGENEFNDYLRRVDAAFNEHKISFTKRSRLLTPADKLPKDFISRQL

SEQ ID NO: 4782 - protein, 160 aa, unidentified; identical to SEQ ID NO: 4741
  REGION 1..160: note = Description of Unknown: uncultivated organism with predicted taxonomy: Bacteroides sp. CAG:770
  REGION 1..160: note = MG16-60 HNH domain

SEQ ID NO: 4783 - protein, 160 aa, unidentified
  REGION 1..160: note = Description of Unknown: uncultivated organism with predicted taxonomy: Bacteroides sp. CAG:709
  REGION 1..160: note = MG16-61 HNH domain
ELKLSKEGRAATAKNIRDREKENKEIAEKIIELGVTPSKNKILKYRLWQEAGQKCFYCGQPVGATEFLNGLEVEIEHVVPKALLFDDSFSNKVCACRKCNAEKRNSTAYDYMKSKGENAFNDYLRRVDTAFSEHKISFTKRSRLLTPADKIPKDFISRQL

SEQ ID NO: 4784 - protein, 160 aa, unidentified; identical to SEQ ID NO: 4741
  REGION 1..160: note = Description of Unknown: uncultivated organism with predicted taxonomy: Bacteroides sp. CAG:770
  REGION 1..160: note = MG16-62 HNH domain

SEQ ID NO: 4785 - protein, 160 aa, unidentified; identical to SEQ ID NO: 4741
  REGION 1..160: note = Description of Unknown: uncultivated organism with predicted taxonomy: Bacteroides sp. CAG:770
  REGION 1..160: note = MG16-63 HNH domain

SEQ ID NO: 4786 - protein, 160 aa, unidentified; identical to SEQ ID NO: 4756
  REGION 1..160: note = Description of Unknown: uncultivated organism with predicted taxonomy: Alistipes sp. CAG:514
  REGION 1..160: note = MG16-64 HNH domain

SEQ ID NO: 4787 - protein, 160 aa, unidentified
  REGION 1..160: note = Description of Unknown: uncultivated organism with predicted taxonomy: Bacteroides sp. CAG:770
  REGION 1..160: note = MG16-65 HNH domain
ELKLSKEGRESAAKNISDRKKANEEIARRIEELGLVPSKNKILKYRLWEESGKRCFYCGQPVSAAEFLNGLDVEIEHVIPKSLLFDDSFSNKVCACRKCNAEKDNATAFDFMKGRGENAFEDYLKRVETAFKENKISQTKRNRLLTPADKIPKDFISRQL

SEQ ID NO: 4788 - protein, 160 aa, unidentified
  REGION 1..160: note = Description of Unknown: uncultivated organism with predicted taxonomy: Bacteroides sp. CAG:770
  REGION 1..160: note = MG16-66 HNH domain
ELKLSKEGRAATAKNIRDREKMNNEMAEKIKELGITPSKNKILKYRLWQESGQKCFYCGQPVGAAEFLSGLDVEIEHIVPKALLFDDSFSNKVCACRKCNAEKSNTTAYDYMKSKGENEFNDYLRRVDAAFNAHKISFTKRSRLLTPADKLPKDFISRQL

SEQ ID NO: 4789 - protein, 160 aa, unidentified; identical to SEQ ID NO: 4741
  REGION 1..160: note = Description of Unknown: uncultivated organism with predicted taxonomy: Bacteroides sp. CAG:545
  REGION 1..160: note = MG16-67 HNH domain

SEQ ID NO: 4790 - protein, 160 aa, unidentified; identical to SEQ ID NO: 4744
  REGION 1..160: note = Description of Unknown: uncultivated organism with predicted taxonomy: Bacteroides sp. CAG:770
  REGION 1..160: note = MG16-68 HNH domain

SEQ ID NO: 4791 - protein, 160 aa, unidentified; identical to SEQ ID NO: 4754
  REGION 1..160: note = Description of Unknown: uncultivated organism with predicted taxonomy: Bacteroides sp. CAG:709
  REGION 1..160: note = MG16-69 HNH domain

SEQ ID NO: 4792 - protein, 160 aa, unidentified; identical to SEQ ID NO: 4741
  REGION 1..160: note = Description of Unknown: uncultivated organism with predicted taxonomy: Bacteroides sp. CAG:770
  REGION 1..160: note = MG16-70 HNH domain

SEQ ID NO: 4793 - protein, 160 aa, unidentified; identical to SEQ ID NO: 4741
  REGION 1..160: note = Description of Unknown: uncultivated organism with predicted taxonomy: Bacteroides sp. CAG:545
  REGION 1..160: note = MG16-72 HNH domain

SEQ ID NO: 4794 - protein, 160 aa, unidentified; identical to SEQ ID NO: 4741
  REGION 1..160: note = Description of Unknown: uncultivated organism with predicted taxonomy: Bacteroides sp. CAG:545
  REGION 1..160: note = MG16-73 HNH domain

SEQ ID NO: 4795 - protein, 160 aa, unidentified
  REGION 1..160: note = Description of Unknown: uncultivated organism with predicted taxonomy: Bacteroides sp. CAG:770
  REGION 1..160: note = MG16-74 HNH domain
ELKLSKAGRESAAKNIRTREKANEEIAKRIEELGLVPSKNKILKYRLWEESGKRCFYCGQPVSATEFLNGLDVEIEHIVPKSLLFDDSFSNKVCACRKCNAEKDNATAFDFMKGRGENAFEDYLKRVETAFKENKISQTKRNRLLTPADKIPKDFISRQL

SEQ ID NO: 4796 - protein, 160 aa, unidentified; identical to SEQ ID NO: 4754
  REGION 1..160: note = Description of Unknown: uncultivated organism with predicted taxonomy: Bacteroides sp. CAG:709
  REGION 1..160: note = MG16-75 HNH domain

SEQ ID NO: 4797 - protein, 160 aa, unidentified; identical to SEQ ID NO: 4754
  REGION 1..160: note = Description of Unknown: uncultivated organism with predicted taxonomy: Bacteroides
  REGION 1..160: note = MG16-76 HNH domain

SEQ ID NO: 4798 - protein, 160 aa, unidentified
  REGION 1..160: note = Description of Unknown: uncultivated organism with predicted taxonomy: Bacteroides sp. CAG:770
  REGION 1..160: note = MG16-77 HNH domain
ELKLSKAGRESAAKNIRTREKANEEIAKRIEELGLVPSKNKILKYRLWEESGKRCFYCGQPVSAAEFLNGLDVEIEHVVPKSLLFDDSFSNKVCACRKCNAEKGNATAFDFMKGRGENAFEDYLKRVETAFKENKISQTKRNRLLTPADKIPKDFIARQL

SEQ ID NO: 4799 - protein, 160 aa, unidentified; identical to SEQ ID NO: 4747
  REGION 1..160: note = Description of Unknown: uncultivated organism with predicted taxonomy: Bacteroides
  REGION 1..160: note = MG16-78 HNH domain

SEQ ID NO: 4800 - protein, 160 aa, unidentified
  REGION 1..160: note = Description of Unknown: uncultivated organism with predicted taxonomy: Bacteroides sp. CAG:770
  REGION 1..160: note = MG16-79 HNH domain
ELKLSKEGRAATAKNIRDREKMNNEMAEKIKELGITPSKNKILKYRLWQESGQKCFYCGQPVGAAEFLSGLDVEIEHIVPKALLFDDSFSNKVCACRKCNAEKSNTTAYDYMKSKGENEFNDYLRRVDAAFNEHRISFIKRSRLLTPADKLPKDFISRQL

SEQ ID NO: 4801 - protein, 160 aa, unidentified; identical to SEQ ID NO: 4769
  REGION 1..160: note = Description of Unknown: uncultivated organism with predicted taxonomy: Bacteroides sp. CAG:545
  REGION 1..160: note = MG16-80 HNH domain

SEQ ID NO: 4802 - protein, 160 aa, unidentified; identical to SEQ ID NO: 4754
  REGION 1..160: note = Description of Unknown: uncultivated organism with predicted taxonomy: Bacteroides
  REGION 1..160: note = MG16-81 HNH domain

SEQ ID NO: 4803 - protein, 160 aa, unidentified
  REGION 1..160: note = Description of Unknown: uncultivated organism with predicted taxonomy: Bacteroides sp. CAG:770
  REGION 1..160: note = MG16-82 HNH domain
ELKLSKEGRAATAKNIRDREKMNNEMAEKIKELGITPSKNKLLKYRLWQESGQKCFYCGQPVGAAEFLSGLDVEIEHIVPKALLFDDSFSNKVCACRKCNAEKSNTTAYDYMKSKGENEFNDYLRRVDAAFNEHKISFTKRSRLLTPANKLPKDFISRQL

SEQ ID NO: 4804 - protein, 160 aa, unidentified; identical to SEQ ID NO: 4741
  REGION 1..160: note = Description of Unknown: uncultivated organism with predicted taxonomy: Bacteroides sp. CAG:545
  REGION 1..160: note = MG16-83 HNH domain

SEQ ID NO: 4805 - protein, 160 aa, unidentified
  REGION 1..160: note = Description of Unknown: uncultivated organism with predicted taxonomy: Bacteroidetes
  REGION 1..160: note = MG16-84 HNH domain
ELKESKDERESAFKRNNENERKNKEYEARIREYGIRPSRSRIQKYKMWEESQKKCFYCGKTIDVVEFLNGVDAEIEHIIPQSVLFDDSFSNKVCSCRDCNHTKGNLTAREFMEQHSAADYEAYLRRVDEAFDEHRISKTKRDHLLWRKEDIPQDFIDRQL

SEQ ID NO: 4806 - protein, 160 aa, unidentified; identical to SEQ ID NO: 4741
  REGION 1..160: note = Description of Unknown: uncultivated organism with predicted taxonomy: Bacteroides
  REGION 1..160: note = MG16-85 HNH domain

SEQ ID NO: 4807 - protein, 160 aa, unidentified; identical to SEQ ID NO: 4744
  REGION 1..160: note = Description of Unknown: uncultivated organism with predicted taxonomy: Bacteroides sp. CAG:545
  REGION 1..160: note = MG16-86 HNH domain

SEQ ID NO: 4808 - protein, 160 aa, unidentified; identical to SEQ ID NO: 4744
  REGION 1..160: note = Description of Unknown: uncultivated organism with predicted taxonomy: Bacteroides
  REGION 1..160: note = MG16-87 HNH domain

SEQ ID NO: 4809 - protein, 160 aa, unidentified; identical to SEQ ID NO: 4740
  REGION 1..160: note = Description of Unknown: uncultivated organism with predicted taxonomy: Bacteroides
  REGION 1..160: note = MG16-88 HNH domain

SEQ ID NO: 4810 - protein, 160 aa, unidentified; identical to SEQ ID NO: 4753
  REGION 1..160: note = Description of Unknown: uncultivated organism with predicted taxonomy: Bacteroides sp. CAG:709
  REGION 1..160: note = MG16-89 HNH domain

SEQ ID NO: 4811 - protein, 160 aa, unidentified; identical to SEQ ID NO: 4780
  REGION 1..160: note = Description of Unknown: uncultivated organism with predicted taxonomy: Bacteroides sp. CAG:770
  REGION 1..160: note = MG16-90 HNH domain

SEQ ID NO: 4812 - protein, 160 aa, unidentified; identical to SEQ ID NO: 4780
  REGION 1..160: note = Description of Unknown: uncultivated organism with predicted taxonomy: Bacteroides sp. CAG:770
  REGION 1..160: note = MG16-91 HNH domain

SEQ ID NO: 4813 - protein, 160 aa, unidentified; identical to SEQ ID NO: 4756
  REGION 1..160: note = Description of Unknown: uncultivated organism with predicted taxonomy: Alistipes sp. CAG:514
  REGION 1..160: note = MG16-92 HNH domain

SEQ ID NO: 4814 - protein, 160 aa, unidentified; identical to SEQ ID NO: 4756
  REGION 1..160: note = Description of Unknown: uncultivated organism with predicted taxonomy: Alistipes sp. CAG:514
  REGION 1..160: note = MG16-93 HNH domain

SEQ ID NO: 4815 - protein, 160 aa, unidentified; identical to SEQ ID NO: 4741
  REGION 1..160: note = Description of Unknown: uncultivated organism with predicted taxonomy: Bacteroides sp. CAG:545
  REGION 1..160: note = MG16-94 HNH domain

SEQ ID NO: 4816 - protein, 160 aa, unidentified; identical to SEQ ID NO: 4754
  REGION 1..160: note = Description of Unknown: uncultivated organism with predicted taxonomy: Bacteroides sp. CAG:709
  REGION 1..160: note = MG16-95 HNH domain

SEQ ID NO: 4817 - protein, 160 aa, unidentified; identical to SEQ ID NO: 4741
  REGION 1..160: note = Description of Unknown: uncultivated organism with predicted taxonomy: Bacteroides
  REGION 1..160: note = MG16-96 HNH domain

SEQ ID NO: 4818 - protein, 160 aa, unidentified
  REGION 1..160: note = Description of Unknown: uncultivated organism with predicted taxonomy: Bacteroides
  REGION 1..160: note = MG16-97 HNH domain
ELKLSKEGRAATAKNIRNREKMNNEMAEKIKELGITPSKNKILKYRLWQESGQKCFYCGQPVGAAEFLSGLDVEIEHIVPKALLFDDSFSNKVCACRKCNAEKSNTTAYDYMKSKGENEFNDYLRRVDAAFNEHKISFTKRSRLLTPADKLPKDFISRQL

SEQ ID NO: 4819 - protein, 160 aa, unidentified
  REGION 1..160: note = Description of Unknown: uncultivated organism with predicted taxonomy: Bacteroides sp. CAG:770
  REGION 1..160: note = MG16-98 HNH domain
ELKLSKEGRESAAKNIRAREKANEEIAKRIEELGLVPSKNKILKYRLWEESGKRCFYCGQPVSATEFLNGLDVEIEHVVPKSLLFDDSFSNKVCACRKCNAEKGNATAFDFMKGRGENAFEDYLKRVETAFKENKISQTKRNRLLTPADKIPKDFIARQL

SEQ ID NO: 4820 - protein, 160 aa, unidentified
  REGION 1..160: note = Description of Unknown: uncultivated organism with predicted taxonomy: Bacteroides sp. CAG:709
  REGION 1..160: note = MG16-99 HNH domain
ELKLSKEGRAATAKNIRDREKENKEIAEKIIELGVTPSKNKILKYRLWQEAGQKCFYCGQPVGATEFLNGLDVEIEHVVPKALLFDDSFSNKVCACRKCNAEKRDSTAYDYMKSKGENAFNDYLRRVDTAFSEHKISFTKRSRLLTPADKIPKDFISRQL

SEQ ID NO: 4821 - protein, 160 aa, unidentified
  REGION 1..160: note = Description of Unknown: uncultivated organism with predicted taxonomy: Bacteroides sp. CAG:709
  REGION 1..160: note = MG16-100 HNH domain
ELKLSKEGRAATAKNIRDREKENKEIAEKIIELDVTPSKNKILKYRLWQEAGQKCFYCGQPVGATEFLNGLDVEIEHVVPKALLFDDSFSNKVCACRKCNAEKRNSTAYDYMKSKGENAFNDYLRRVDTAFSEHKISFTKRSRLLTPADKIPKDFISRQL

SEQ ID NO: 4822 - protein, 160 aa, unidentified; identical to SEQ ID NO: 4741
  REGION 1..160: note = Description of Unknown: uncultivated organism with predicted taxonomy: Bacteroides sp. CAG:545
  REGION 1..160: note = MG16-101 HNH domain

SEQ ID NO: 4823 - protein, 160 aa, unidentified
  REGION 1..160: note = Description of Unknown: uncultivated organism with predicted taxonomy: Bacteroides sp. CAG:770
  REGION 1..160: note = MG16-102 HNH domain
ELKLSKAGRESAANNIRTRKKANEEIAKRIEELGLVPSKNKILKYRLWEESGKRCFYCGQPVSATEFLNGLDVEIEHVVPKSLLFDDSFSNKVCACRKCNAEKGNATAFDFMKGRGENAFEDYLKRVETAFKENKISQTKRNRLLTPADKIPKDFISRQL

SEQ ID NO: 4824 - protein, 160 aa, unidentified; identical to SEQ ID NO: 4767
  REGION 1..160: note = Description of Unknown: uncultivated organism with predicted taxonomy: Bacteroides sp. CAG:770
  REGION 1..160: note = MG16-103 HNH domain

SEQ ID NO: 4825 - protein, 160 aa, unidentified; identical to SEQ ID NO: 4754
  REGION 1..160: note = Description of Unknown: uncultivated organism with predicted taxonomy: Bacteroides
  REGION 1..160: note = MG16-104 HNH domain

SEQ ID NO: 4826 - protein, 160 aa, unidentified
  REGION 1..160: note = Description of Unknown: uncultivated organism with predicted taxonomy: Bacteroides sp. CAG:770
  REGION 1..160: note = MG16-105 HNH domain
ELKLSKAGRESAANNIRTRKKVNEEIAKRIEELGLVPSKNKILKYRLWEESGKRCFYCGQPVSATEFLNGLDVEIEHVVPKSLLFDDSFSNKVCACRKCNAEKGNATAFDFMKGRGENAFEDYLKRVETAFKENRISQTKRNRLLTPADKIPKDFIARQL

SEQ ID NO: 4827 - protein, 160 aa, unidentified; identical to SEQ ID NO: 4741
  REGION 1..160: note = Description of Unknown: uncultivated organism with predicted taxonomy: Bacteroides sp. CAG:545
  REGION 1..160: note = MG16-106 HNH domain

SEQ ID NO: 4828 - protein, 160 aa, unidentified; identical to SEQ ID NO: 4741
  REGION 1..160: note = Description of Unknown: uncultivated organism with predicted taxonomy: Bacteroides sp. CAG:545
  REGION 1..160: note = MG16-107 HNH domain

SEQ ID NO: 4829 - protein, 160 aa, unidentified; identical to SEQ ID NO: 4746
  REGION 1..160: note = Description of Unknown: uncultivated organism with predicted taxonomy: Bacteroides sp. CAG:770
  REGION 1..160: note = MG16-108 HNH domain

SEQ ID NO: 4830 - protein, 160 aa, unidentified; identical to SEQ ID NO: 4754
  REGION 1..160: note = Description of Unknown: uncultivated organism with predicted taxonomy: Bacteroides sp. CAG:709
  REGION 1..160: note = MG16-109 HNH domain

SEQ ID NO: 4831 - protein, 160 aa, unidentified; identical to SEQ ID NO: 4754
  REGION 1..160: note = Description of Unknown: uncultivated organism with predicted taxonomy: Bacteroides sp. CAG:709
  REGION 1..160: note = MG16-110 HNH domain

SEQ ID NO: 4832 - protein, 160 aa, unidentified; identical to SEQ ID NO: 4741
  REGION 1..160: note = Description of Unknown: uncultivated organism with predicted taxonomy: Bacteroides sp. CAG:770
  REGION 1..160: note = MG16-113 HNH domain

SEQ ID NO: 4833 - protein, 160 aa, unidentified; identical to SEQ ID NO: 4741
  REGION 1..160: note = Description of Unknown: uncultivated organism with predicted taxonomy: Bacteroides sp. CAG:545
  REGION 1..160: note = MG16-114 HNH domain

SEQ ID NO: 4834 - protein, 160 aa, unidentified; identical to SEQ ID NO: 4747
  REGION 1..160: note = Description of Unknown: uncultivated organism with predicted taxonomy: Bacteroides sp. CAG:770
  REGION 1..160: note = MG16-115 HNH domain

SEQ ID NO: 4835 - protein, 160 aa, unidentified; identical to SEQ ID NO: 4741
  REGION 1..160: note = Description of Unknown: uncultivated organism with predicted taxonomy: Bacteroides
  REGION 1..160: note = MG16-116 HNH domain

SEQ ID NO: 4836 - protein, 160 aa, unidentified; identical to SEQ ID NO: 4787
  REGION 1..160: note = Description of Unknown: uncultivated organism with predicted taxonomy: Bacteroides sp. CAG:770
  REGION 1..160: note = MG16-118 HNH domain

SEQ ID NO: 4837 - protein, 160 aa, unidentified; identical to SEQ ID NO: 4754
  REGION 1..160: note = Description of Unknown: uncultivated organism with predicted taxonomy: Bacteroides sp. CAG:709
  REGION 1..160: note = MG16-119 HNH domain

SEQ ID NO: 4838 - protein, 160 aa, unidentified; identical to SEQ ID NO: 4770
  REGION 1..160: note = Description of Unknown: uncultivated organism with predicted taxonomy: Bacteroides sp. CAG:709
  REGION 1..160: note = MG16-120 HNH domain

SEQ ID NO: 4839 - protein, 160 aa, unidentified
  REGION 1..160: note = Description of Unknown: uncultivated organism with predicted taxonomy: Bacteroides sp. CAG:770
  REGION 1..160: note = MG16-121 HNH domain
ELKLSKAGRESAAKNVRTREKANEEIAKRIEELGLVPSKNKILKYRLWEESGKRCFYCGQPVSATEFLNGLDVEIEHVVPKSLLFDDSFSNKVCACRKCNAEKGNATAFDFMKGHGENAFEDYLKRVETAFKENRISQTKRNRLLTPADKIPKDFISRQL

SEQ ID NO: 4840 - protein, 160 aa, unidentified
  REGION 1..160: note = Description of Unknown: uncultivated organism with predicted taxonomy: Bacteroides sp. CAG:770
  REGION 1..160: note = MG16-122 HNH domain
ELKLSKAGRESAAKNIRTREKANEEIAKRIEELGLVPSKNKILKYRLWEEFGKRCFYCGQPVSATEFLNGLDVEIEHVVPKSLLFDDSFSNKVCACRKCNAEKGNATAFDFMKGRGENAFEDYLKRVETAFKENRISQTKRNRLLTPADKIPKDFISRQL

SEQ ID NO: 4841 - protein, 160 aa, unidentified; identical to SEQ ID NO: 4747
  REGION 1..160: note = Description of Unknown: uncultivated organism with predicted taxonomy: Bacteroides sp. CAG:545
  REGION 1..160: note = MG16-123 HNH domain

SEQ ID NO: 4842 - protein, 160 aa, unidentified
  REGION 1..160: note = Description of Unknown: uncultivated organism with predicted taxonomy: Bacteroides sp. CAG:770
  REGION 1..160: note = MG16-126 HNH domain
ELKLSKEGRAATAKNIRDREKMNNEMAEKIKELGITPSKNKILKYRLWQESGQKCFYCGQPVGAAEFLCGLDVEIEHIVPKALLFDDSFSNKVCACRKCNAEKSNTTAYDYMKSKGENEFNDYLRRVDAAFNEHKISFTKRSRLLTPADKLPKDFISRQL

SEQ ID NO: 4843 - protein, 160 aa, unidentified; identical to SEQ ID NO: 4754
  REGION 1..160: note = Description of Unknown: uncultivated organism with predicted taxonomy: Bacteroides sp. CAG:709
  REGION 1..160: note = MG16-127 HNH domain

SEQ ID NO: 4844 - protein, 160 aa, unidentified; identical to SEQ ID NO: 4741
  REGION 1..160: note = Description of Unknown: uncultivated organism with predicted taxonomy: Bacteroides sp. CAG:770
  REGION 1..160: note = MG16-128 HNH domain

SEQ ID NO: 4845 - protein, 160 aa, unidentified; identical to SEQ ID NO: 4754
  REGION 1..160: note = Description of Unknown: uncultivated organism with predicted taxonomy: Bacteroides sp. CAG:709
  REGION 1..160: note = MG16-129 HNH domain

SEQ ID NO: 4846 - protein, 160 aa, unidentified
  REGION 1..160: note = Description of Unknown: uncultivated organism with predicted taxonomy: Bacteroides sp. CAG:770
  REGION 1..160: note = MG16-130 HNH domain
ELKLSKAGRESAANNIRTREKANEEIAKRIEELGLVPSKNKILKYRLWEESGKRCFYCGQPVSATEFLNGLDVEIEHVVPKSLLFDDSFSNKVCACRKCNAEKGNATAFDFMKGRGENAFEDYLKRVETAFKENKISQTKRNRLLTPADKIPKDFISRQL

SEQ ID NO: 4847 - protein, 160 aa, unidentified
  REGION 1..160: note = Description of Unknown: uncultivated organism with predicted taxonomy: Bacteroides sp. CAG:709
  REGION 1..160: note = MG16-131 HNH domain
ELKLSKEGRAATAKNIRDREKENKEIAEKIIELGVTPSKNKILKYRLWQEAGQKCFYCGQPVGATEFLNGLDVEIEHVVPKALLFDDSFSNKVCACRKCNAEKRNSTAYDYMKSKGENAFNDYLRRVDTAFSEHKISFTKRSRLLTPADKIPKDFVSRQL

SEQ ID NO: 4848 - protein, 160 aa, unidentified; identical to SEQ ID NO: 4741
  REGION 1..160: note = Description of Unknown: uncultivated organism with predicted taxonomy: Bacteroides
  REGION 1..160: note = MG16-132 HNH domain

SEQ ID NO: 4849 - protein, 174 aa, unidentified
  REGION 1..174: note = Description of Unknown: uncultivated organism with predicted taxonomy: Bacteroidales
  REGION 1..174: note = MG16-133 HNH domain
ELKQSKEEREKTDRGIRKQQKANEVFANLLKEQGVRPTRNRILKYRLWRESYETCFYCGQPISFKEFLKFSDVEREHVIPKRLLYDDSFANQVCSCRKCNAEKGGRTAIDYMRTTQHLQPYLEKVDKMFQEHKISGKKHAHLLASYDDYLSRKKEGKETKDDIIIWEEAIERQL

SEQ ID NO: 4850 - protein, 197 aa, unidentified
  REGION 1..197: note = Description of Unknown: uncultivated organism
  REGION 1..197: note = MG16-134 HNH domain
ELKQSKDDRNTTYLQNEAMERLNDAIAKRLNSEGIKTTKRILEKYKYIFPTKGCIDKKTGKFVSKNFENLSTVNQCIYCGKSFSLTAALNGDGYEVEHIIPRDLICDNSQSNKVLSCRSCNSKKSNKTAFDFMRGQGEQALEDYIARIEKWYKDGIISPAKREHLLLSHEDYLKRKKEGKTTDEDKKYWEDFVSRQA

SEQ ID NO: 4851 - protein, 197 aa, unidentified
  REGION 1..197: note = Description of Unknown: uncultivated organism with predicted taxonomy: Porphyromonas sp. oral taxon 278
  REGION 1..197: note = MG16-135 HNH domain
ELKQSKDERNVTFLQNEAMQRLNDSIANRLSSEGIKPTKRTIEKYKFIFPTKGCFDKRTGKFITKNFENLSTVNRCIYCGQPFSLSAALNGDGYEVEHILPRDLICDNSQSNKVLSCRKCNSIKSNKTAFDFMRSQGEHAFETYLERVESWYKDGIISPSKRERLLLSHEDYLERKRKDKATDIDKKYWEDFVSRQA

SEQ ID NO: 4852 - protein, 160 aa, unidentified
  REGION 1..160: note = Description of Unknown: uncultivated organism with predicted taxonomy: Bacteroidales
  REGION 1..160: note = MG16-136 HNH domain
ELKQSRDERNDAYLSINKRERENKVIEERIREYGISPSKSRIQKYRLWEESNHLCFYCGHPVGAAEFLSGSGVEIEHIIPRSLLFDDSFANKVCACRQCNAEKGNSTAFDYMKSKPANDFEDYLKRVEKYFTEKRISKTKRERLLTPASEIPQDFIDRQL

SEQ ID NO: 4853 - protein, 174 aa, unidentified
  REGION 1..174: note = Description of Unknown: uncultivated organism with predicted taxonomy: Prevotella
  REGION 1..174: note = MG16-137 HNH domain
ELKQSKDERNETEIGIRKQQKLNDEYAKILKEEGVRPTRNRILKYRLWRESNKSCFYCEQPISFHEFLDFSETEREHIIPKKLMYDDSFANQVCSCRNCNKEKGGRTAMDYMRTKQNLQFYLDKVDKMFQDHKISGKKRSHLLASYDDYLFRKENGKETKDDILIWEKPIERQL

SEQ ID NO: 4854 - protein, 160 aa, unidentified
  REGION 1..160: note = Description of Unknown: uncultivated organism
  REGION 1..160: note = MG16-138 HNH domain
ELKQSRDERNSAFLNNNKRERDNKAISERIQEMGIRASRSRILKYRLWEEAKHICFYCGQTVGVKEFLEGTDVEIEHIIPRSLFFDDSFSNKVCACRKCNAEKGNRTAYDYMKQKSDNDFADYTRRIEDAYEKKEISKTKRERLLTTAKDIPEDFIDRQL

SEQ ID NO: 4855 - protein, 161 aa, unidentified
  REGION 1..161: note = Description of Unknown: uncultivated organism with predicted taxonomy: Bacteroidales
  REGION 1..161: note = MG16-139 HNH domain
ELKQSRDERESAYKAINKNERENSTIANRILEDYGIRPSRSRIQKYRMWEESKQRCFYCGKMIDVKQFLSGADVEIEHIVPRSILFDDSYSNKVCACRECNQEKGNLTAMEYMEGKPTGEFEAYKQRVDEAFSEHRISKTKRDHLLWRRADIPQDFIERQL

SEQ ID NO: 4856 - protein, 160 aa, unidentified
  REGION 1..160: note = Description of Unknown: uncultivated organism with predicted taxonomy: Fibrobacter
  REGION 1..160: note = MG16-140 HNH domain
ELKQSKDERNTTASNIAKRERENKNIEAKIQEFGIRSSRNRIQKYRLWEESEQKCFYCGQPVQAKEFLSGLDVEVEHVIPKSLLFDDSFANKVCACRKCNAAKGNKTAYDFMKGQKEEVFDAYVKRVNDFYKDGKISKTKKERLLTTQSEIPSDFIERQL

SEQ ID NO: 4857 - protein, 160 aa, unidentified
  REGION 1..160: note = Description of Unknown: uncultivated organism with predicted taxonomy: Bacteroidales
  REGION 1..160: note = MG16-141 HNH domain
ELKQSREEREGAYRRNNQNERLNKEIAAKIEEMGIRPSRSRIQKYKMWEESNHRCMYCGKTVSLAEFLNGADVEIEHIIPRSILFDDSFSNKVCACRECNHEKGNMTALDYLETKPAAEVEAYKQRVDEAFKEGRISKTKRDHLLWHKSDIPTDFIDRQL

SEQ ID NO: 4858 - protein, 160 aa, unidentified
  REGION 1..160: note = Description of Unknown: uncultivated organism with predicted taxonomy: Bacteroidales
  REGION 1..160: note = MG16-142 HNH domain
ELKQSREERESAYKAINKNEHENAERAAKIAEFGIRPSRSRVQKYKMWEESQHRCFYCGKMVDLAQFLNGADVEIEHIVPRSILFDDSFSNKVCACRECNKEKGNLTAMEYIETKPVGEQEAYKQRVAEAFDAHRISKTKRDHLLWRRADIPQDFIERQL

SEQ ID NO: 4859 - protein, 160 aa, unidentified
  REGION 1..160: note = Description of Unknown: uncultivated organism with predicted taxonomy: Deminuibacter soli
  REGION 1..160: note = MG16-143 HNH domain
ELKQSRDERNDAFLKNNKRERENKVIEERIREYGITPSRSRIQKYRLWEESNHLCFYCGQPVGAAEFLSGSGVEIEHIIPRSLLFDDSYANKVCSCRKCNAEKGNSTAYDYMKAKPEGDFEDYLKRIEKFFSEKRISKSKREKLLTPASEIPQDFIDRQL

SEQ ID NO: 4860 - protein, 197 aa, unidentified
  REGION 1..197: note = Description of Unknown: uncultivated organism with predicted taxonomy: Bacteroidales
  REGION 1..197: note = MG16-144 HNH domain
ELKQSKDERNTTFLQNEAMQRLNESIAKRLVSENINPTKRIIDKYKFIFPTKGCFDKRTGKFITKNFESLSTVNRCIYCGQSFSLSEALNGDGYEIEHILPRDLICDNSQNNKVLSCRKCNSIKSNKTAFDYMRTQDKNAFEAYLERVESWYKDGIISPAKRERLLLSHEDYLERKRIGKETDEDKKYWEEFVSRQA

SEQ ID NO: 4861 - protein, 197 aa, unidentified
  REGION 1..197: note = Description of Unknown: uncultivated organism with predicted taxonomy: Bacteroides
  REGION 1..197: note = MG16-145 HNH domain
ELKQSKDERNTTFLQNEAMQRLNESITKRLESENIKPTKRIIEKYKFIFPTKGCFDKRTGKFITKNFEDLSTINYCIYCGQPFSLSAALNGDGYEVEHILPRDLICDNSQNNKVLSCRRCNSIKSNKTAFDFMRSQEKNAFEAYLERVETWYQDGIISPGKRERLLLSHEDYLERKRLGKETDEDKKYWEEFVSRQA

SEQ ID NO: 4862 - protein, 160 aa, unidentified
  REGION 1..160: note = Description of Unknown: uncultivated organism with predicted taxonomy: Bacteroidetes
  REGION 1..160: note = MG16-146 HNH domain
ELKQSKDERNSTFLNNNKRERENKIIEERIAEMGIRPSRSRILKYRLWEEAKHICFYCGQPVGVKEFLEGAEVEIEHIIPRSLFFDDSFANKVCSCRKCNAEKGNRTAFDYMKQKGENEFSDYSRRIEEAFEKKEISKVKRERLLTSAKDIPEDFIDRQL

SEQ ID NO: 4863 - protein, 160 aa, unidentified
  REGION 1..160: note = Description of Unknown: uncultivated organism with predicted taxonomy: Bacteroidales
  REGION 1..160: note = MG16-147 HNH domain
ELKQSREERESAYRAMGQNERRNKEIAEKISEFGIRPSRSRIQKYKMWEESMHQCFYCGKTIDLSEFLNGADVEIEHIIPRSILFDDSFSNKVCACRRCNQEKGNQTAMEYMETKSAAEQEAYKQRVDEAFTAKRISKTKRDHLLWRKADIPADFIERQL

SEQ ID NO: 4864 - protein, 160 aa, unidentified
  REGION 1..160: note = Description of Unknown: uncultivated organism with predicted taxonomy: Bacteroidales
  REGION 1..160: note = MG16-148 HNH domain
ELKQSRDERESAYKAMGQNERRNKEIAAKITEFGIRPSRSRIQKYKMWEESLHQCFYCGKTIDLSEFLNGADVEIEHIIPRSILFDDSFSNKVCACRRCNQEKGNQTAMEYMETKSAAEQEAYKQRVDEAFTAKRISKTKRDHLLWRKTDIPSDFIERQL

SEQ ID NO: 4865 - protein, 197 aa, unidentified
  REGION 1..197: note = Description of Unknown: uncultivated organism with predicted taxonomy: Bacteroidetes
  REGION 1..197: note = MG16-149 HNH domain
ELKQSKDERNVTFLQNEAMQRLNDSIANRLSSEGIKPTKRTIEKYKFIFPTKGCFDKRTGKFITKNFENLSTVNRCIYCGQPFSLSAALNGDGYEVEHILPRDLICDNSQSNKVLSCRKCNSIKSNKTAFDFMRSQGEHAFETYLERVESWYKDGIISPSKRERLLLSHEDYLERKKKGKITDIDKKYWEDFVSRQA

SEQ ID NO: 4866 - protein, 174 aa, unidentified
  REGION 1..174: note = Description of Unknown: uncultivated organism with predicted taxonomy: Bacteroidales
  REGION 1..174: note = MG16-150 HNH domain
ELKQSKTEREEASAGIRKQQALNDNYANILKSESIRPTRNKILKYRLWTESNKTCFYCDQPVNFKEYLQTTEFEREHVIPKRLIFDDSFANQVCSCSKCNKEKGGLTALDFMRTKANLRNYLDKVDSMYQKHEISGKKRSHLLASYDDYLERKKEGKETKEDIMIWETPIDRQL

SEQ ID NO: 4867 - protein, 197 aa, unidentified; identical to SEQ ID NO: 4861
  REGION 1..197: note = Description of Unknown: uncultivated organism with predicted taxonomy: Prevotella
  REGION 1..197: note = MG16-151 HNH domain

SEQ ID NO: 4868 - protein, 161 aa, unidentified
  REGION 1..161: note = Description of Unknown: uncultivated organism with predicted taxonomy: Fibrobacter
  REGION 1..161: note = MG16-152 HNH domain
ELKQSKDERNTTFNNIAKRERENKGIAERIKNEYGLIPNRNKIEKYRLWEEAEQKCFYCGQTVNVKEFLSGFDVEVEHVIPKSLLFDDSYANKVCACRKCNANKGNKTAFDFMKSQSEDAFNNYVSRVEEYYKNGKISRTKHDRLLTPQSEIPSDFIERQL

SEQ ID NO: 4869 - protein, 160 aa, unidentified
  REGION 1..160: note = Description of Unknown: uncultivated organism with predicted taxonomy: Bacteroidales
  REGION 1..160: note = MG16-153 HNH domain
ELKQSREEREGAYRRNNQNERLNKEIIAKIEEMGIRPSRSRIQKYKMWEENNHRCMYCGKTVSLAEFLNGADVEIEHIIPRSILFDDSFSNKVCACRECNHEKGNMTALDYIETKPAAEQEAYKQRVDEAFKEGRISKTKRDHLLWHRSEIPTDFIERQL

SEQ ID NO: 4870 - protein, 160 aa, unidentified
  REGION 1..160: note = Description of Unknown: uncultivated organism with predicted taxonomy: Bacteroidales
  REGION 1..160: note = MG16-154 HNH domain
ELKQSRDERESAYKAMGQNERRNKEIAAKIAEFGIRPSRSRIQKYKMWEESQHQCFYCGKTIDLSEFLNGADVEIEHIIPRSILFDDSFSNKVCACRRCNQEKGNQTAMEYMETKSAAEQETYKQRVDEAFTAKRISKTKRDHLLWRKADIPADFIERQL

SEQ ID NO: 4871 - protein, 160 aa, unidentified
  REGION 1..160: note = Description of Unknown: uncultivated organism with predicted taxonomy: Bacteroidales
  REGION 1..160: note = MG16-155 HNH domain
ELKQSRDERNSTFLNNSKRERENKIISERIQEMGIRPSRNRIQKYRLWEESKHICFYCGQPVGVREFMEGVDVEIEHIIPRSLFFDDSFSNKVCACRKCNAEKGNRTAYDYVKKKGENEFADYTRRIEEAFEKKEISKTKRERLLTSAKDIPEDFIDRQL

SEQ ID NO: 4872 - protein, 160 aa, unidentified
  REGION 1..160: note = Description of Unknown: uncultivated organism with predicted taxonomy: Bacteroidales
  REGION 1..160: note = MG16-156 HNH domain
ELKQSREERESAYKAINKNERENAERAAKIAEFGIRPSRSRVQKYKMWEESQHRCFYCGKMVDLAQFLNGADVEIEHIVPRSILFDDSFSNKVCACRECNKEKGNLTAMEYIETKPVGEQEAYKQRVAEAFDAHRISKTKRDHLLWRRADIPQDFIERQL

SEQ ID NO: 4873 - protein, 160 aa, unidentified
  REGION 1..160: note = Description of Unknown: uncultivated organism with predicted taxonomy: Fibrobacter
  REGION 1..160: note = MG16-157 HNH domain
ELKQSKDERKATAANIAKRERENKAIAAKIEEFGIRPSRNRIQKYRLWEESEQKCFYCGQPVDAREFLSGLDVEVEHIIPKSLLFDDSFANKVCACRKCNAAKGNRTAFDYMKSQSSNAFDAYIKRVNDFYKDGKISKTKNERLLTTQSEIPSDFIERQL

SEQ ID NO: 4874 - protein, 160 aa, unidentified
  REGION 1..160: note = Description of Unknown: uncultivated organism with predicted taxonomy: Bacteroidetes
  REGION 1..160: note = MG16-158 HNH domain
ELKQSRDERNNAFLNNNKRERENKVLEERIREYGISPSRSRIQKYRLWEESNHLCFYCGQPVGAAEFLSGSGVEIEHIIPRSLLFDDSYANKVCSCRKCNAEKGNSTAYDYMKAKPEGDFEDYLKRIETFFSEKRISKAKRDKLLTPATDIPQDFIDRQL

SEQ ID NO: 4875 - protein, 177 aa, unidentified
  REGION 1..177: note = Description of Unknown: uncultivated organism with predicted taxonomy: Bacteroidetes
  REGION 1..177: note = MG16-159 HNH domain
ELKQSKDERNEAFRRNNQNERLNKEYAERIKEYGLTPTRNRIMKMKMWEESEYTCMYCGQPVNVTEFLQGADVEREHIIPRGLLFDNSFTNQVCSCRRCNSQKGMRTAYDFIADDKGQEGLDSYIDRINDLFNRKQISRSKFNRLLVSHKAYMSRKAQGKETEEDKELWENFIDRQL

SEQ ID NO: 4876 - protein, 160 aa, unidentified
  REGION 1..160: note = Description of Unknown: uncultivated organism with predicted taxonomy: Fibrobacter
  REGION 1..160: note = MG16-160 HNH domain
ELKQSKDERNTTASNIAKRERENEKIEAKIQEFGIRSSRNRIQKYRLWEESEQKCFYCGDTVNVKEFLSGLDVEVEHVIPKSLLFDDSFANKVCACRKCNAAKGNKTAYDFMEGQKKEVFDAYVKRVNDFYKDGKISKTKKERLLTTQSKIPSDFIERQL

SEQ ID NO: 4877 - protein, 160 aa, unidentified
  REGION 1..160: note = Description of Unknown: uncultivated organism with predicted taxonomy: Bacteroidales
  REGION 1..160: note = MG16-161 HNH domain
ELKQSREERENAYKRNNQNERLNKEIAAKIEEMGIRPSRSRIQKYKMWEESDHRCMYCGKMVSLAEFLNGADVEIEHIIPRSILFDDSYSNKVCACRDCNREKDNLTALDYLETKTGAELEAYKQRVDDAFKEGRISKTKRDHLLWRREDIPSDFIERQL

SEQ ID NO: 4878 - protein, 177 aa, unidentified
  REGION 1..177: note = Description of Unknown: uncultivated organism with predicted taxonomy: Prevotella
  REGION 1..177: note = MG16-162 HNH domain
ELKQSKDERNEAFKRNNQNEKKNKEYAEHIKEYQLTPTRNRLLKWKLYEESDHACMYCGQPIKVREFLQGADVEREHIIPKGLLFDNSFTNQVCSCRSCNSKKGMRTAYDFIEAEKGEEGLRSYIEHINYLFDKKNISRSKYNRLLVSYKAYLQRKVQGKETEEDKNLWENFIDRQL

SEQ ID NO: 4879 - protein, 197 aa, unidentified; identical to SEQ ID NO: 4861
  REGION 1..197: note = Description of Unknown: uncultivated organism with predicted taxonomy: Bacteroides
  REGION 1..197: note = MG16-163 HNH domain

SEQ ID NO: 4880 - protein, 177 aa, unidentified
  REGION 1..177: note = Description of Unknown: uncultivated organism with predicted taxonomy: Prevotella
  REGION 1..177: note = MG16-164 HNH domain
ELKQSKDERNETYRRNNQNEKKNKEYAERIKKYELTPTRNRIMKMKMLEESEYKCMYCGQPVKEKEFLQGADVEREHIIPRALLFDNSFTNQVCSCRSCNSQKGMRTAYDFIADDKGQEGLEAYIERINDLFNKKKISRSKLNRLLVSYKAYVSRKAQGKETEEDVQLWENFIDRQL

SEQ ID NO: 4881 - protein, 160 aa, unidentified
  REGION 1..160: note = Description of Unknown: uncultivated organism
  REGION 1..160: note = MG16-165 HNH domain
ELKQSREEREGAYRRNNQNERLNKEIAAKIEEMGIRPSRSRIQKYKMWEESNHRCMYCGKTVSLAEFLNGADVEIEHIIPRSILFDDSFSNKVCACRECNHEKGNMTALDYLETKPATEVEAYKQRVDEAFKEGQISKTKRDHLLWHRSDIPTDFIDRQL

SEQ ID NO: 4882 - protein, 177 aa, unidentified
  REGION 1..177: note = Description of Unknown: uncultivated organism with predicted taxonomy: Bacteroidales
  REGION 1..177: note = MG16-166 HNH domain
ELKQNREERNEAFKRNAQNEKLNKEYAERIKEYGLTPTRNRIMKMKMWEESENTCMYCGQPVDVVEFLQGADVEREHIIPRGLLFDNSFTNQVCSCRKCNSQKGMRTAYDFIEDEKGQEGLESYIKHINYLFDKKKINRSKLNRLLVSHKAYINRKSLGKETEEDKQLWENFIDRQL

SEQ ID NO: 4883 - protein, 160 aa, unidentified
  REGION 1..160: note = Description of Unknown: uncultivated organism with predicted taxonomy: Bacteroidales
  REGION 1..160: note = MG16-167 HNH domain
ELKQSRDERESAYKAMGQNERRNKEIAAKIAEFGIRSSRSRIQKYKMWEESLHQCFYCGKTIDLSEFLNGADVEIEHIIPRSILFDDSFSNKVCACRRCNQEKGNQTAMEYMETKSASEQEAYKQRVDEAFTTKRISLTKRDHLLWHKADIPSDFIDRQE

SEQ ID NO: 4884 - protein, 174 aa, unidentified
  REGION 1..174: note = Description of Unknown: uncultivated organism with predicted taxonomy: Barnesiella viscericola
  REGION 1..174: note = MG16-168 HNH domain
ELKQSKDERKETENGIRKQQKMNDEYANILKEEGIRPTRNRVLKYRLWRESNETCFYCERPINFNEFLKFSDIEREHIIPKKLIFDDSFANQVCSCRKCNKEKGGRTALDYMQTTPNLQMYLDKVDKMFQEHKISGKKHLHLLASYEDYLIRKKEGKETKDDIKIWETPIERQL

SEQ ID NO: 4885 - protein, 160 aa, unidentified; identical to SEQ ID NO: 4858
  REGION 1..160: note = Description of Unknown: uncultivated organism with predicted taxonomy: Bacteroidales
  REGION 1..160: note = MG16-169 HNH domain

SEQ ID NO: 4886 - protein, 160 aa, unidentified; identical to SEQ ID NO: 4854
  REGION 1..160: note = Description of Unknown: uncultivated organism
  REGION 1..160: note = MG16-170 HNH domain

SEQ ID NO: 4887 - protein, 160 aa, unidentified; identical to SEQ ID NO: 4877
  REGION 1..160: note = Description of Unknown: uncultivated organism with predicted taxonomy: Bacteroidales
  REGION 1..160: note = MG16-171 HNH domain

SEQ ID NO: 4888 - protein, 160 aa, unidentified
  REGION 1..160: note = Description of Unknown: uncultivated organism with predicted taxonomy: Prevotella brevis
  REGION 1..160: note = MG16-172 HNH domain
ELKQSREEREGAYRRNNQNERLNKEIAAKIEEMGIRPSRSRIQKYKMWEETNHRCMYCGKTVSLAEFLNGADVEIEHIIPRSILFDDSFSNKVCACRECNHEKGNMTALDYIETKPAAEVEAYKQRVDEAFKEGQISKTKRDHLLWHKSDIPTDFIDRQL

SEQ ID NO: 4889 - protein, 197 aa, unidentified; identical to SEQ ID NO: 4861
  REGION 1..197: note = Description of Unknown: uncultivated organism with predicted taxonomy: Bacteroides
  REGION 1..197: note = MG16-173 HNH domain

SEQ ID NO: 4890 - protein, 160 aa, unidentified
  REGION 1..160: note = Description of Unknown: uncultivated organism with predicted taxonomy: Bacteroidetes
  REGION 1..160: note = MG16-174 HNH domain
ELKQSRDERESAYKAMGKNERRNKEIAEKIAEFGIRPSRSRIQKYKMWEESMHQCFYCGKTIDLAEFLNGADVEIEHIIPRSILFDDSFSNKVCACRRCNQEKSNQTAMEYMETKPVGELEAYKRRVDEAFTAKRISKTKRDHLLWRKADIPTDFIERQL

SEQ ID NO: 4891 - protein, 174 aa, unidentified; identical to SEQ ID NO: 4884
  REGION 1..174: note = Description of Unknown: uncultivated organism with predicted taxonomy: Prevotella
  REGION 1..174: note = MG16-175 HNH domain

SEQ ID NO: 4892 - protein, 160 aa, unidentified
  REGION 1..160: note = Description of Unknown: uncultivated organism with predicted taxonomy: Bacteroidales
  REGION 1..160: note = MG16-176 HNH domain
ELKQSRDERESAYKAMGQNERRNKEIAAKIAEFGIRPSRSRIQKYKMWEESLHQCFYCGKTIDLSEFLNGADVEIEHIIPRSILFDDSFSNKVCACRRCNQEKGNQTAMEYMETKSAAEQETYKQRVDEAFTAKRISKTKRDHLLWRKADIPADFIERQL

SEQ ID NO: 4893 - protein, 160 aa, unidentified; identical to SEQ ID NO: 4869
  REGION 1..160: note = Description of Unknown: uncultivated organism with predicted taxonomy: Bacteroidia
  REGION 1..160: note = MG16-177 HNH domain

SEQ ID NO: 4894 - protein, 160 aa, unidentified; identical to SEQ ID NO: 4872
  REGION 1..160: note = Description of Unknown: uncultivated organism with predicted taxonomy: Porphyromonas sp. oral taxon 278
  REGION 1..160: note = MG16-178 HNH domain

SEQ ID NO: 4895 - protein, 160 aa, unidentified; identical to SEQ ID NO: 4854
  REGION 1..160: note = Description of Unknown: uncultivated organism
  REGION 1..160: note = MG16-179 HNH domain

SEQ ID NO: 4896 - protein, 160 aa, unidentified
  REGION 1..160: note = Description of Unknown: uncultivated organism with predicted taxonomy: Bacteroidales
  REGION 1..160: note = MG16-180 HNH domain
ELKQSREERENAFKRNNQNERLNKEIADKIEEMGIRPSRSRIQKYKMWEESNHRCMYCGKTVSLAEFLNGADVEIEHIIPRSILFDDSFSNKVCACRECNHEKDNMTALDYLETKPAVEVDAYKQRVDEAFKEGRISKTKRDHLLWHKSDIPQDFIDRQL

SEQ ID NO: 4897 - protein, 160 aa, unidentified; identical to SEQ ID NO: 4872
  REGION 1..160: note = Description of Unknown: uncultivated organism with predicted taxonomy: Bacteroidales
  REGION 1..160: note = MG16-181 HNH domain

SEQ ID NO: 4898 - protein, 177 aa, unidentified; identical to SEQ ID NO: 4875
  REGION 1..177: note = Description of Unknown: uncultivated organism with predicted taxonomy: Prevotella
  REGION 1..177: note = MG16-182 HNH domain

SEQ ID NO: 4899 - protein, 177 aa, unidentified
  REGION 1..177: note = Description of Unknown: uncultivated organism with predicted taxonomy: Prevotella
  REGION 1..177: note = MG16-183 HNH domain
ELKQSKDERNEAFRRNNQNERLNKEYAERIKEYGLTPTRNRIMKMKMWEESEYTCMYCGQPVNVTEFLQGADVEREHIIPRGLLFDNSFTNQVCSCRRCNSQKGMRTAYDFIADDKGQEGLDSYIDRINDLFNRKQISRSKFNRLLVSHKAYMNRKAQGKETEEDKELWENFIDRHL

SEQ ID NO: 4900 - protein, 160 aa, unidentified; identical to SEQ ID NO: 4872
  REGION 1..160: note = Description of Unknown: uncultivated organism with predicted taxonomy: Bacteroidales
  REGION 1..160: note = MG16-184 HNH domain

SEQ ID NO: 4901 - protein, 160 aa, unidentified; identical to SEQ ID NO: 4876
  REGION 1..160: note = Description of Unknown: uncultivated organism with predicted taxonomy: Fibrobacter
  REGION 1..160: note = MG16-185 HNH domain

SEQ ID NO: 4902 - protein, 177 aa, unidentified; identical to SEQ ID NO: 4880
  REGION 1..177: note = Description of Unknown: uncultivated organism with predicted taxonomy: Prevotella
  REGION 1..177: note = MG16-186 HNH domain

SEQ ID NO: 4903 - protein, 160 aa, unidentified
  REGION 1..160: note = Description of Unknown: uncultivated organism with predicted taxonomy: Bacteroidales
  REGION 1..160: note = MG16-187 HNH domain
ELKQSRDERESAYRAMGQNERRNKEIAAKIAEFGIRPSRSRIQKYKMWEKSLHQCFYCGKTIDLSEFLNGADVEIEHIIPRSILFDDSFSNKVCACRRCNQEKGNQTAMEYMETKSAAEQEAYKQRVDEAFTAKRISKTKRDHLLWRKADIPSDFIERQL

SEQ ID NO: 4904 - protein, 177 aa, unidentified
  REGION 1..177: note = Description of Unknown: uncultivated organism
  REGION 1..177: note = MG16-188 HNH domain
ELKQSKDERNETFKRNNQNERQNKEYAERIKKYGLTPTRNRIMKLKMWEESEHACMYCEQPVDPIEFLKGSDVEREHIIPRGLLFDNSFTNQVCSCRRCNSKKGMRTAYDFIADDKGQEGLNAYIEHINDLFDKKKISRSKLNRLLVSHKAYISRKAQGKETEEDKDLWENFIDRQL

SEQ ID NO: 4905 - protein, 177 aa, unidentified; identical to SEQ ID NO: 4904
  REGION 1..177: note = Description of Unknown: uncultivated organism
  REGION 1..177: note = MG16-189 HNH domain

SEQ ID NO: 4906 - protein, 177 aa, unidentified
  REGION 1..177: note = Description of Unknown: uncultivated organism with predicted taxonomy: Prevotella ruminicola
  REGION 1..177: note = MG16-190 HNH domain
ELKQSKDERNEVFKRNSQNERKNKEYAERIKEYGLTPTRNRIMKMRMWEESEYTCMYCGQPVNVSEFLKGADVEREHIIPRGLLFDNSFTNQVCSCRRCNSKKGMRTAYDFIADEKGQEGLDIYIDRINDLFNRKKISRSKFNRLMASHKAYMSRKAQGKETDEDKELWENFIDRQL

SEQ ID NO: 4907 - protein, 160 aa, unidentified
  REGION 1..160: note = Description of Unknown: uncultivated organism with predicted taxonomy: Labilibaculum filiforme
  REGION 1..160: note = MG16-191 HNH domain
ELKQSRDERESAYKAMGQNERRNKEIAAKIAEFGIRPSRSRIQKYKMWEKSLHQCFYCGKTIDLSEFLNGADVEIEHIIPRSILFDDSFSNKVCACRRCNQEKGNQTAMEYMETKSAAEQEAYKQRVDEAFTAKRISKTKRDHLLWRKADIPSDFIERQL

SEQ ID NO: 4908 - protein, 177 aa, unidentified
  REGION 1..177: note = Description of Unknown: uncultivated organism with predicted taxonomy: Bacteroidales
  REGION 1..177: note = MG16-192 HNH domain
ELKQSKDERNEAFKRNNQNERLNKELAERIMKYGLTPTRNRILKLKMWEESEHSCMYCGQPVDPVEFLKGVDVEREHIIPRGLLFDNSFTNQVCSCRRCNSKKGMRTAYDFIADDKGQEGLDTYIDRINDLFNRKKISRSKFNRLLASHKAYISRKSQGKETDEDKELWENFIDRQL

SEQ ID NO: 4909 - protein, 160 aa, unidentified
  REGION 1..160: note = Description of Unknown: uncultivated organism
  REGION 1..160: note = MG16-193 HNH domain
ELKQTKDERNTTASNIAKRERENKNIEAKIQEFGIRSSRNRIQKYRLWEESDQKCFYCGQPVQAKEFLSGLDVEVEHIIPKSLLFDDSFANKVCACRKCNAAKGNKTAYDFMKGQKEEVFDAYVKRVNDFYKDGKISKTKKERLLTTQSDIPSDFIERQL

SEQ ID NO: 4910 - protein, 177 aa, unidentified
  REGION 1..177: note = Description of Unknown: uncultivated organism with predicted taxonomy: Sediminibacterium sp. C3
  REGION 1..177: note = MG16-194 HNH domain
ELKQSKDERNETFRRNSQNEKKNKEFAEHIKEYNLTPTRNRILKWKLYEESDHSCMYCGQSINIRDFLQGADAEREHIVPRGLLFDNSFTNQVCACRSCNSKKGMRTAYDFIEDEKGEEGLHSYIEHINYLFNKKNISRSKFNRLLVSHKAYLKRKALGKETEEDKELWDNFIDRQL

SEQ ID NO: 4911 - protein, 175 aa, unidentified
  REGION 1..175: note = Description of Unknown: uncultivated organism with predicted taxonomy: Bacteroides
  REGION 1..175: note = MG16-195 HNH domain
ELKQSKDERHDTSEVIKALENKNKEYKTFIEKEYKLKATRKNLLRYRLWIESNQSCFYCLKPIKFTPFANESEEEREHILPKALHYDDSFANQVCSCKDCNSTKGGRTAMDYMRTTPYLQHYIDRVNKLYQANKISGKKYSHLLASYDDYQLRKKEGKETKEDILIWEKPIDRQL

SEQ ID NO: 4912 - protein, 177 aa, unidentified
  REGION 1..177: note = Description of Unknown: uncultivated organism with predicted taxonomy: Gammaproteobacteria bacterium
  REGION 1..177: note = MG16-196 HNH domain
ELKQSKDERNEAFKRNSQNERENKEYAERIKEYGLTPTRNRIMKMRMWEESEYTCMYCGQPVNVVEFLKGADVEREHIIPRGLLFDNSFTNQVCSCRRCNSKKGMRTAYDFIADDKGQEGLDTYIDRINDLFNRKKISRSKFNRLLASHKAYISRKSQGKETDEDKELWENFIDRQL

SEQ ID NO: 4913 - protein, 174 aa, unidentified
  REGION 1..174: note = Description of Unknown: uncultivated organism with predicted taxonomy: Bacteroides
  REGION 1..174: note = MG16-197 HNH domain
ELKQSKDERKEASDGIRKQQKRNEEYAKMLVEEGVRPTRNRILRYRLWEESNKRCFYCGQPISFNEFIKSSDAEREHVIPKALMFDDSFANQVCSCRECNKEKGGRTALDYMRTKSNLQAYLDRVDDMYQSHQIGGKKHSHLLASYDDYLSRKKEGKETKEDIMIWETPIERQL

SEQ ID NO: 4914 - protein, 177 aa, unidentified
  REGION 1..177: note = Description of Unknown: uncultivated organism with predicted taxonomy: Bacteroidales
  REGION 1..177: note = MG16-198 HNH domain
ELKQSKDERNEAFKRNNQNERLNKELAERIMKYGLTPTRNRILKLKMWEESEHSCMYCGQPVDPVEFLKGVDVEREHIIPRGLLFDNSFTNQVCSCRRCNSKKGMRTAYDFIADDKGQEGLDTYIDRINDLFNRKKISRSKFNRLLASHKAYINRKALGKETDEDKELWENFIDRQL

SEQ ID NO: 4915 - protein, 177 aa, unidentified; identical to SEQ ID NO: 4908
  REGION 1..177: note = Description of Unknown: uncultivated organism with predicted taxonomy: Gammaproteobacteria bacterium
  REGION 1..177: note = MG16-199 HNH domain

SEQ ID NO: 4916 - protein, 160 aa, unidentified
  REGION 1..160: note = Description of Unknown: uncultivated organism with predicted taxonomy: Fibrobacter
  REGION 1..160: note = MG16-200 HNH domain
ELKQSKDERNTTASNIAKKERENKNIEAKIQEFGIRSSRNRIQKYRLWEESEQKCFYCGQPVQAKEFLSGLDVEVEHIIPKSLLFDDSFANKVCACRKCNADKGNKTAYDFMKGQKTEVFDAYVKRVNDFYKDGKISKTKKERLLTTQSEIPSDFIERQL

SEQ ID NO: 4917 - protein, 197 aa, unidentified
  REGION 1..197: note = Description of Unknown: uncultivated organism with predicted taxonomy: Prevotella
  REGION 1..197: note = MG16-201 HNH domain
ELKQSKDERNTTFLQNEAMQKLNESIATRLSSEGIKPTKRTIEKYKFIFPTKGCIDNRTGKFVTKNFDNLLTVNQCIYCGQPFSLSAALNGDGYEIEHIIPRDLICDNSQNNKVLSCRNCNSKKSNRTAFDFMRSQDNATFEAYLERVELWYQKGIISPAKRERLLLSYEDYLERKKKGKITDIDKKYWEDFVSRQA

SEQ ID NO: 4918 - protein, 161 aa, unidentified
  REGION 1..161: note = Description of Unknown: uncultivated organism
  REGION 1..161: note = MG16-202 HNH domain
ELKQSRDERESAYKAMGQNERRNKEIAAKIAEFGIRPSRSRIQKYKMWEESQHRCFYCGEMMDLTQFLNGADVEIEHIIPRSILFDDSYSNKVCACRRCNQEKGNMTAMEYMEAKPSAEFEAYKQRVDDVFNKDHRISKTKRDHLLWRRADIPQDFIDRQL

SEQ ID NO: 4919 - protein, 174 aa, unidentified
  REGION 1..174: note = Description of Unknown: uncultivated organism with predicted taxonomy: Bacteroides sp. CAG:144
  REGION 1..174: note = MG16-203 HNH domain
ELKQSKEERDETSKGISKQQKLNDEYANLLKESGIRPTRNKITRYRLWREANETCFYCGQPVNFNEFVKFSEAEREHIIPKSLILDDSFANQVCSCRKCNAEKGGRTAIDYMRTTPYLQAYLTKVDEMFQGHKISGKKHAHLLASYEDYLVRKQQGKETKEDVNIWEAPIDRQL

SEQ ID NO: 4920 - protein, 177 aa, unidentified
  REGION 1..177: note = Description of Unknown: uncultivated organism with predicted taxonomy: Bacteroidales
  REGION 1..177: note = MG16-204 HNH domain
ELKQSKDERNEAFRRNNQNERLNKELAERIKKYGLTPTRNRIMKLKMWEESEHSCMYCKQPVDPVEFLKGADVEREHIIPRALLFDNSFTNQVCSCRRCNSKKGMRTAYDFIADEKGQEGLNAYIEHINDLFDKKKISRSKLNRLLVSHKAYISRKAQGKETDEDKELWENFIDRQL

SEQ ID NO: 4921 - protein, 160 aa, unidentified; identical to SEQ ID NO: 4916
  REGION 1..160: note = Description of Unknown: uncultivated organism with predicted taxonomy: Fibrobacter
  REGION 1..160: note = MG16-205 HNH domain

SEQ ID NO: 4922 - protein, 177 aa, unidentified; identical to SEQ ID NO: 4908
  REGION 1..177: note = Description of Unknown: uncultivated organism with predicted taxonomy: Gammaproteobacteria bacterium
  REGION 1..177: note = MG16-206 HNH domain

SEQ ID NO: 4923 - protein, 174 aa, unidentified
  REGION 1..174: note = Description of Unknown: uncultivated organism
  REGION 1..174: note = MG16-207 HNH domain
ELKQSKEERDETSKGISKQQKLNDEYANLLKGKGIRPTRNKITRYRLLMESNETCFYCGQPVNFNEFVKFSEAEREHIIPKSLILDDSFANQVCSCRKCNAEKGGRTAIDYMRTTPHLQAFLSKVDEMFQGHKISGKKHAHLLASYEDYLVRKKQGKETKEDVNIWETPIDRQL

SEQ ID NO: 4924 - protein, 174 aa, unidentified
  REGION 1..174: note = Description of Unknown: uncultivated organism
  REGION 1..174: note = MG16-208 HNH domain
ELKQSKDEREKTSKDIRANKKKNDECAERVKEYGFSPTRNRIMRYKMWVETNHRCIYCNDGVNVKDFLSGVDVEREHIIPKALLFDDSFSNQTCSCRKCNRDKGSRTALDYIRDCGREEEYITRVNELLEKRQISKTKYNHLLTSYRDYLERKTQGKETQEDKDLWEHFIDRQL

SEQ ID NO: 4925 - protein, 197 aa, unidentified; identical to SEQ ID NO: 4917
  REGION 1..197: note = Description of Unknown: uncultivated organism with predicted taxonomy: Chryseobacterium vrystaatense
  REGION 1..197: note = MG16-209 HNH domain

SEQ ID NO: 4926 - protein, 160 aa, unidentified
  REGION 1..160: note = Description of Unknown: uncultivated organism
  REGION 1..160: note = MG16-210 HNH domain
ELKQSKDERNEVFLRNNKRERENAEIIKRIEEYGVRPSRSRIQKYRLWEESNQICFYCGNTVGVKEFLSGVDAEIEHIIPRSLFFDDSFSNKVCACRACNQEKGNRTAYDYMQSKSEIEFDNYLRRVENYYNEKKISKTKRERLLTAAKDIPQDFLDRQL

SEQ ID NO: 4927 - protein, 197 aa, unidentified
  REGION 1..197: note = Description of Unknown: uncultivated organism with predicted taxonomy: Prevotella
  REGION 1..197: note = MG16-211 HNH domain
ELKQSKDERNTTFLQNEAMQRLNESIAKRLSFEDIKPTKRTIEKYKFIFPTKGCIDKRTGKFVTKSFDGLSTINQCIYCGQPFSLSAALNGDGYEIEHIIPRDLLCDNSQNNKVLSCRKCNSRKSNKTAFDFMRSQDESIFEEYLERIELWYKNGIISPTKREHLLLSHEDYLERKKKGKVTDIDKKYWEDFVSRQV

SEQ ID NO: 4928 - protein, 177 aa, unidentified; identical to SEQ ID NO: 4878
  REGION 1..177: note = Description of Unknown: uncultivated organism with predicted taxonomy: Prevotella ihumii
  REGION 1..177: note = MG16-212 HNH domain

SEQ ID NO: 4929 - protein, 160 aa, unidentified
  REGION 1..160: note = Description of Unknown: uncultivated organism with predicted taxonomy: Treponema pedis
  REGION 1..160: note = MG16-213 HNH domain
ELKQSKDERNEVFLRNNKRERENAEITKRIEEYGIRPSRSRIQKYRLWEESNHICFYCGQPVGAKEFLSGVDVEIEHIIPRSLFFDDSFSNKVCACRKCNQDKGNSTAFDFMKAKPEVEFDNYLRRVESYYNEKRISKTKRDRLLTAAKDIPEDFINRQL

SEQ ID NO: 4930 - protein, 177 aa, unidentified
  REGION 1..177: note = Description of Unknown: uncultivated organism with predicted taxonomy: Sediminibacterium sp. C3
  REGION 1..177: note = MG16-214 HNH domain
ELKQSKDERNETFKRNNQNERQNKEYAERIKEYGLTPTRNRIMKMKMWEESEYTCMYCGQPVNVTEFLKGADVEREHIIPRGLLFDNSFTNQVCSCRRCNSKKGMRTAYDFIADDKGQEGLNAYIDRINDLFDKKKISRSKLNRLLVSHKAYISRKAQGKETEEDKELWENFIDRQL

SEQ ID NO: 4931 - protein, 177 aa, unidentified
  REGION 1..177: note = Description of Unknown: uncultivated organism with predicted taxonomy: Prevotella
  REGION 1..177: note = MG16-215 HNH domain
ELKQSRDERNETFKRNNQNERQNKVYAERIKEYGLTPTRNRIMKMKMWEESEYTCMYCGQPVNVTEFLKGADVEREHIIPRGLLFDNSFTNQVCSCRRCNSKKGMRTAYDFIADDKGQDGLNAYIDRINNLFDKKKISRSKLNRLLVSHKAYISRKAQGKETDEDKELWENFIDRQL

SEQ ID NO: 4932 - protein, 177 aa, unidentified
  REGION 1..177: note = Description of Unknown: uncultivated organism with predicted taxonomy: Bacteroidales
  REGION 1..177: note = MG16-216 HNH domain
ELKQSKDERNEAFKRNNQNERQNKEYAERIKEYGLTPTRNRIMKMKMWEESEYTCMYCGQPINVTEFLQGADVEREHIIPRALLFDNSFTNQVCSCRRCNSQKGMRTAYDFIADDKGQEGLDLYIERINDLFDRKKISRSKLNRLLVSHKAYVSRKAQGKETEEDKELWENFIDRQL

SEQ ID NO: 4933 - protein, 177 aa, unidentified
  REGION 1..177: note = Description of Unknown: uncultivated organism with predicted taxonomy: Porphyromonas catoniae
  REGION 1..177: note = MG16-217 HNH domain
ELKQSKDERNEAFKRNNQNERQNKEYAERIKVYGLTPTRNRIMKMKMWEESEYTCMYCGQPVNVTEFLQGADVEREHIIPRGLLFDNSFTNQVCSCRRCNSKKGMRTAYDFIADDKGQEGLDAYIDRINDLFNKKKISRSKLNRLLVSHKAYIIRKTQGKETEEDKELWENFIDRQL

SEQ ID NO: 4934 - protein, 177 aa, unidentified
  REGION 1..177: note = Description of Unknown: uncultivated organism with predicted taxonomy: Prevotella
  REGION 1..177: note = MG16-218 HNH domain
ELKQSKDERNEVFKRNSQNERKNKEYAERIKEYGLTPTRNRIMKMRMWEESEYTCMYCGQPVNVSEFLKGADVEREHIIPRGLLFDNSFTNQVCSCRRCNSKKGMRTAYDFIADEKGQEGLDIYIDRINDLFNRKKISRSKFNRLMASHKAYMRRKAQGKETDEDKELWENFIDRQL

SEQ ID NO: 4935 - protein, 161 aa, unidentified
  REGION 1..161: note = Description of Unknown: uncultivated organism with predicted taxonomy: Fibrobacter
  REGION 1..161: note = MG16-219 HNH domain
ELKQSKDERNTTFNNIAKRERENKGIAERIKNEYGLIPNRNKIEKYRLWEEAEQKCFYCGQTVNVKEFLSGFDVEVEHVIPKSLLFDNSYANKVCACRKCNANKGNKTAFDFMKSQSEDAFNNYVSRVEEYYKNGKISRTKHDRLLTPQSEIPSDFIERQL

SEQ ID NO: 4936 - protein, 177 aa, unidentified; identical to SEQ ID NO: 4932
  REGION 1..177: note = Description of Unknown: uncultivated organism with predicted taxonomy: Sediminibacterium sp. C3
  REGION 1..177: note = MG16-220 HNH domain

SEQ ID NO: 4937 - protein, 177 aa, unidentified
  REGION 1..177: note = Description of Unknown: uncultivated organism with predicted taxonomy: Sediminibacterium sp. C3
  REGION 1..177: note = MG16-221 HNH domain
ELKQSKDERNETFKRNSQNERNNKEYAERIKEYGLTPTRNRIMKMKMWEESEYTCVYCGQPVNVTEFLKGADVEREHIIPRGLLFDNSFTNQVCSCRLCNSKKGMRTAYDFIADDKGQAGLETYIDRINDLFNRKKISRSKFNRLLVSYKAYISRKAKGKETEEDKELWENFIDRQL

SEQ ID NO: 4938 - protein, 177 aa, unidentified
  REGION 1..177: note = Description of Unknown: uncultivated organism with predicted taxonomy: Prevotella sp. ne3005
  REGION 1..177: note = MG16-222 HNH domain
ELKQSKDERNETFKRNNQNERQNKEYAERIKKYSLTPTRNRIMKLKMWEESEHACMYCEEPVDPIEFLKGADVEREHIIPRGLLFDNSFTNQVCSCRRCNSKKGMRTAYDFIADDKGQEGLNAYIDRINDLFDKKKISRSKLNRLLVSHKAYISRKAQGKETEEDKELWENFIDRQL

SEQ ID NO: 4939 - protein, 177 aa, unidentified
  REGION 1..177: note = Description of Unknown: uncultivated organism with predicted taxonomy: Prevotella copri
  REGION 1..177: note = MG16-223 HNH domain
ELKQSKDERNETYRRNNQNEKKNNEYAERIKEYGLTPTRNRIMKMKMLEESEYKCMYCGQPVREKEFLQGADVEREHIIPKALLFDNSFTNQVCSCRSCNSQKGMRTAYDFIADDKGQEGLEAYIERINDLFNKKKISRSKLNRLLVSHKAYVSRKAQGKETEEDVQLWENFIDRQL

SEQ ID NO: 4940 - protein, 177 aa, unidentified
  REGION 1..177: note = Description of Unknown: uncultivated organism with predicted taxonomy: Bacteroides sp. CAG:770
  REGION 1..177: note = MG16-224 HNH domain
ELKQSKDERNEAFKRNNQNERQNKELAERIKNYGLTPTRNRIMKLKMWEESEHSCMYCKQPVDPIEFLKGADVEREHIIPRGLLFDNSFTNQVCSCRRCNSQKGMRTAYDFIADDKGQEGLNAYIEHINDLFEKKKISRSKLNRLLVSHKAYLSRKAQGRETEEDKELWENFIDRQL

SEQ ID NO: 4941 - protein, 160 aa, unidentified
  REGION 1..160: note = Description of Unknown: uncultivated organism with predicted taxonomy: Bacteroidales
  REGION 1..160: note = MG16-225 HNH domain
ELKQSKDERAQTTERINKNERENKAIEERIREHGIRPSRARIQKYKMWEESQHQCFYCGKSISAAEFLSGADVEVEHIIPKSILFDDSFSNKVCACRDCNHTKDNLTARDFMETRGQAELDAYLARVNTAFEEGRISKTKRDHLLWHKEEIPQDFIDRQL

SEQ ID NO: 4942 - protein, 160 aa, unidentified
  REGION 1..160: note = Description of Unknown: uncultivated organism
  REGION 1..160: note = MG16-226 HNH domain
ELKQSRDERKDAFDRNNENEKRNKKISALISEQGIRPSRSRIQKYKMWEESEHRCMYCGKVVNLSEFLNGADVEIEHIIPRSILFDDSFSNKVCACRDCNREKDNMTAMDYMASKPEGEFEAYKQRVDEAFNAHRISKTKRDHLLWRRADIPQAFIDRQL

SEQ ID NO: 4943 - protein, 160 aa, unidentified
  REGION 1..160: note = Description of Unknown: uncultivated organism with predicted taxonomy: Bacteroidales
  REGION 1..160: note = MG16-228 HNH domain
ELKSSKEEREAAFKRNNENERQNKIYEDRIREYGIRPSRSRIQKYKMWEESNHLCFYCGKPVNVTDFLAGAEVEIEHIIPQSVLFDDSYSNKVCACRTCNHTKGNQTAREFMETHSKAEYESYLLRVDDAFNAHRISKTKRDHLLWRKEDIPQDFIDRQL

SEQ ID NO: 4944 - protein, 160 aa, unidentified
  REGION 1..160: note = Description of Unknown: uncultivated organism with predicted taxonomy: Bacteroidales
  REGION 1..160: note = MG16-229 HNH domain
ELKSSKDEREAAFKRNNENERQNKIYEDRIREYGIRPSRSRIQKYKMWEESNHLCFYCGKPVNVTDFLAGAEVEIEHIIPQSVLFDDSYSNKVCACRTCNHTKGNQTAREFMETHSKAEYESYLLRVDDAFNAHRISKTKRDHLLWRKEDIPQDFIDRQL

SEQ ID NO: 4945 - protein, 160 aa, unidentified; identical to SEQ ID NO: 4741
  REGION 1..160: note = Description of Unknown: uncultivated organism with predicted taxonomy: Bacteroides sp. CAG:545
  REGION 1..160: note = MG16-230 HNH domain

SEQ ID NO: 4946 - protein, 160 aa, unidentified; identical to SEQ ID NO: 4798
  REGION 1..160: note = Description of Unknown: uncultivated organism with predicted taxonomy: Bacteroides sp. CAG:770
  REGION 1..160: note = MG16-231 HNH domain

SEQ ID NO: 4947 - protein, 160 aa, unidentified; identical to SEQ ID NO: 4741
  REGION 1..160: note = Description of Unknown: uncultivated organism with predicted taxonomy: Bacteroides sp. CAG:770
  REGION 1..160: note = MG16-232 HNH domain

SEQ ID NO: 4948 - protein, 160 aa, unidentified; identical to SEQ ID NO: 4741
  REGION 1..160: note = Description of Unknown: uncultivated organism with predicted taxonomy: Bacteroides sp. CAG:545
  REGION 1..160: note = MG16-233 HNH domain

SEQ ID NO: 4949 - protein, 160 aa, unidentified
  REGION 1..160: note = Description of Unknown: uncultivated organism with predicted taxonomy: Bacteroides sp. CAG:770
  REGION 1..160: note = MG16-234 HNH domain
ELKLSKEGRESAAKNIRAREKANEEIAKRIEELGLVPSKNKILKYRLWEESGKRCFYCGQPVSAAEFLNGLDVEIEHVIPKSLLFDDSFSNKVCACRKCNAEKDNATAFDFMKGRGENAFEDYLKRVETAFKENRISQTKKNRLLTPADKIPKDFISRQL

SEQ ID NO: 4950 - protein, 160 aa, unidentified; identical to SEQ ID NO: 4949
  REGION 1..160: note = Description of Unknown: uncultivated organism with predicted taxonomy: Bacteroides sp. CAG:770
  REGION 1..160: note = MG16-235 HNH domain

SEQ ID NO: 4951 - protein, 160 aa, unidentified; identical to SEQ ID NO: 4787
  REGION 1..160: note = Description of Unknown: uncultivated organism with predicted taxonomy: Bacteroides sp. CAG:770
  REGION 1..160: note = MG16-236 HNH domain

SEQ ID NO: 4952 - protein, 160 aa, unidentified; identical to SEQ ID NO: 4741
  REGION 1..160: note = Description of Unknown: uncultivated organism with predicted taxonomy: Bacteroides sp. CAG:770
  REGION 1..160: note = MG16-237 HNH domain

SEQ ID NO: 4953 - protein, 160 aa, unidentified; identical to SEQ ID NO: 4741
  REGION 1..160: note = Description of Unknown: uncultivated organism with predicted taxonomy: Bacteroides sp. CAG:545
  REGION 1..160: note = MG16-238 HNH domain

SEQ ID NO: 4954 - protein, 160 aa, unidentified; identical to SEQ ID NO: 4754
  REGION 1..160: note = Description of Unknown: uncultivated organism with predicted taxonomy: Bacteroides sp. CAG:770
  REGION 1..160: note = MG16-239 HNH domain

SEQ ID NO: 4955 - protein, 160 aa, unidentified; identical to SEQ ID NO: 4754
  REGION 1..160: note = Description of Unknown: uncultivated organism with predicted taxonomy: Bacteroides sp. CAG:709
  REGION 1..160: note = MG16-240 HNH domain

SEQ ID NO: 4956 - protein, 160 aa, unidentified; identical to SEQ ID NO: 4754
  REGION 1..160: note = Description of Unknown: uncultivated organism with predicted taxonomy: Bacteroides sp. CAG:770
  REGION 1..160: note = MG16-242 HNH domain

SEQ ID NO: 4957 - protein, 160 aa, unidentified
  REGION 1..160: note = Description of Unknown: uncultivated organism with predicted taxonomy: Bacteroides sp. CAG:709
  REGION 1..160: note = MG16-243 HNH domain
ELKLSKEGRAATAKNIRDREKENKEIAEKIIELGVTPSKNKILKYRLWQEAGQKCFYCGQPVGATEFLNGLDVEIEHVVPKTLLFDDSFSNKVCACRKCNAEKRNSTAYDYMKSKGENAFNDYLRRVDTAFSEHKISFTKRSRLLTPADKIPKDFISRQL

SEQ ID NO: 4958 - protein, 160 aa, unidentified
  REGION 1..160: note = Description of Unknown: uncultivated organism with predicted taxonomy: Bacteroidales
  REGION 1..160: note = MG16-245 HNH domain
ELKQSREERDNAYKAINKNERENAAIAAKIAEFGIRPSRSRIQKYKMWEESNHRCFYCGKTMDIAQFLNGADVEIEHIIPRSILFDDSYSNKVCACRDCNREKDNATAMEYMAGKPTGEFEAYKQRVDEAFTEHRISKTKRDHLLWRRADIPQDFIERQL

SEQ ID NO: 4959 - protein, 177 aa, unidentified
  REGION 1..177: note = Description of Unknown: uncultivated organism with predicted taxonomy: Bacteroides sp. CAG:770
  REGION 1..177: note = MG16-246 HNH domain
ELKQSKDERNEAFKRNNQNERQNKEYAERIKEYGLTPTRNRIMKMKMWEESEYTCMYCGQPVNVTEFLQGADVEREHIIPRALLFDNSFTNQVCSCRRCNSQKGMRTAYDFIEDDKGQEGLNAYIERINDLFNRKKISRSKFNRLLVSHKAYISRKAQGKETEENKELWENFIDRQL

SEQ ID NO: 4960 - protein, 160 aa, unidentified
  REGION 1..160: note = Description of Unknown: uncultivated organism with predicted taxonomy: Porphyromonas sp. oral taxon 278
  REGION 1..160: note = MG16-247 HNH domain
ELKQSRDERDSAYKAINKNERENAAIAAKIAEFGIRSSRSRIQKYKMWEESSHRCFYCGKTMDITQFLSGADVEIEHIIPRSILFDDSFSNKVCACRECNREKGNMTAMEYMEHKPAGEFEAYKQRVDEAFTDHRISKTKRDHLLWRRADIPQDFIDRQL

SEQ ID NO: 4961 - protein, 160 aa, unidentified
  REGION 1..160: note = Description of Unknown: uncultivated organism with predicted taxonomy: Coprobacter sp.
  REGION 1..160: note = MG16-248 HNH domain
ELKQSREERDSAYKAINKNERDNAAIAAKIAEFGVRPSRSRIQKYKMWEESNHRCFYCGKIMDITQFLNGADVEIEHIIPRSILFDDSYSNKVCACRDCNHEKDNSTAMEYMESKPAGEFEAYKQRVDEAFSAHRISKTKRDHLLWRRGDIPQDFIERQL

SEQ ID NO: 4962 - protein, 160 aa, unidentified; identical to SEQ ID NO: 4871
  REGION 1..160: note = Description of Unknown: uncultivated organism with predicted taxonomy: Bacteroides sp. CAG:144
  REGION 1..160: note = MG16-249 HNH domain

SEQ ID NO: 4963 - protein, 177 aa, unidentified
  REGION 1..177: note = Description of Unknown: uncultivated organism with predicted taxonomy: Sediminibacterium sp. C3
  REGION 1..177: note = MG16-250 HNH domain
ELKQSKDERNETFKRNNQNERQNKEYAERIKEYGLTPTRNRIIKMKMWEESEYTCMYCGQPVNVTEFLKGADVEREHIIPRGLLFDNSFTNQVCSCRRCNSKKGMRTAYDFIADDKGQEGLNAYIDRINNLFDKKKISRSKLNRLLVSHKAYISRKAQGKETEEDKELWENFIDRQL

SEQ ID NO: 4964 - protein, 174 aa, unidentified
  REGION 1..174: note = Description of Unknown: uncultivated organism with predicted taxonomy: Bacteroides sp. CAG:144
  REGION 1..174: note = MG16-251 HNH domain
ELKQSKEEREETERGIRKQQKANDGYAKLLKEGGVRPTRNRILKYRLWRESNETCFYCGQPINFNEFLKFSDVEREHVIPKKLLFDDSFANQVCSCRKCNAEKGGRTAFDYMRTKQNLQDYLDKVDKMFQEHKIGGKKHSHLLASYDDYLSRKKEGKETKDDVKIWEEPIERQL

SEQ ID NO: 4965 - protein, 160 aa, unidentified
  REGION 1..160: note = Description of Unknown: uncultivated organism with predicted taxonomy: Bacteroidales
  REGION 1..160: note = MG16-252 HNH domain
ELKQSRDERNDAYLSINKRERENKVIEERIREYGISPSKSRIQKYRLWEESNHLCFYCGHPVGAAEFLSGSGVEIEHIIPRSLLFDDSFANKVCACRKCNAEKGNSTAFDYMKSKPANDFEDYLKRVEKYFTEKRISKTKRERLLTPASEIPQDFIDRQL

SEQ ID NO: 4966 - protein, 174 aa, unidentified
  REGION 1..174: note = Description of Unknown: uncultivated organism
  REGION 1..174: note = MG16-253 HNH domain
ELKQSKEEREETDKGIRKQQKANEEYADILKKKGVRPTRNRILKYRLWKESEEACFYCGRDIDFHEFLRFSDVEREHVIPKKLLFDDSFANQVCSCRRCNAEKGGRTALDYMRTKPNLQEYLDKVDKLFQEHKIGGKKHAHLLASYDDYLSRKKEGKETKDDIMIWEEPIDRQL

SEQ ID NO: 4967 - protein, 160 aa, unidentified
  REGION 1..160: note = Description of Unknown: uncultivated organism with predicted taxonomy: Marinilabiliaceae
  REGION 1..160: note = MG16-254 HNH domain
ELKQSRDERESAYKAMGQNERRNKEIAEKISEFGIRPSRSRIQKYKMWEESLHQCFYCGKTIDLSEFLNGADVEIEHIIPRSILFDDSFSNKVCACRRCNQEKGNQTAMEYMETKSAAEQEAYKQRVDEAFTAKRISKTKRDHLLWRKTDIPADFIERQL

SEQ ID NO: 4968 - protein, 175 aa, unidentified
  REGION 1..175: note = Description of Unknown: uncultivated organism with predicted taxonomy: Bacteroidetes
  REGION 1..175: note = MG16-255 HNH domain
ELKRSKDEREMANIRMNRNKRRNDEIASIIQNEYGLIPTKNRIMKYKMWEETDGFCIYCGTKIKLAEFLGGVDSEREHIIPKSLLFDDSFSNQSCACRKCNKEKGNRTALDYMRDIGKEKQYVEHIAELLEKDKISKTKYSNLLASYKDYLERKAKGKETEEDKNLWENFIDRQL

SEQ ID NO: 4969 - protein, 174 aa, unidentified
  REGION 1..174: note = Description of Unknown: uncultivated organism with predicted taxonomy: Bacteroides sp. CAG:144
  REGION 1..174: note = MG16-256 HNH domain
ELKQSKEEREETERGIRKQQKANDEYAKLLKEGGVRPTRNRILKYRLWRESNETCFYCGQPINFNEFLKFSDVEREHVIPKKLLFDDSFANQVCSCRKCNAEKGGRTAFDYMRTKQNLQDYLDKVDKMFQEHKIGGKKHSHLLASYDDYLSRKKEGKETKDDVKIWEEPIERQL

SEQ ID NO: 4970 - protein, 160 aa, unidentified
  REGION 1..160: note = Description of Unknown: uncultivated organism with predicted taxonomy: Bacteroidia
  REGION 1..160: note = MG16-257 HNH domain
ELKQSREEREGAYRRNNQNERLNKEIFAKIEEMGIRPSRSRIQKYKMWEESNHRCMYCGKTVSLAEFLNGAEVEIEHIIPRSILFDDSFSNKVCACRECNHEKGNLTALDYLETKPTAEQEAYKQRVDEAFKEGRISKTKRDHLLWHRSDIPTDFIDRQL

SEQ ID NO: 4971 - protein, 160 aa, unidentified; identical to SEQ ID NO: 4960
  REGION 1..160: note = Description of Unknown: uncultivated organism with predicted taxonomy: Bacteroidales
  REGION 1..160: note = MG16-258 HNH domain

SEQ ID NO: 4972 - protein, 160 aa, unidentified; identical to SEQ ID NO: 4856
  REGION 1..160: note = Description of Unknown: uncultivated organism with predicted taxonomy: Prevotella saccharolytica
  REGION 1..160: note = MG16-259 HNH domain

SEQ ID NO: 4973 - protein, 175 aa, unidentified; identical to SEQ ID NO: 4968
  REGION 1..175: note = Description of Unknown: uncultivated organism with predicted taxonomy: Bacteroides sp. CAG:770
  REGION 1..175: note = MG16-260 HNH domain

SEQ ID NO: 4974 - protein, 161 aa, unidentified
  REGION 1..161: note = Description of Unknown: uncultivated organism with predicted taxonomy: Bacteroidales
  REGION 1..161: note = MG16-261 HNH domain
ELKQSKDERNTTFNNIAKRERENKGIAERIKNEYGLIPNRNKIEKFRLCEESDHKCFYCGQAVNAKEFLLGSDVEVEHVIPKSLLFDDSFANKVCACRKCNAQKGNKTAFDFMKSQSEDEFNNYVSRVEEYYKNGKISRTKHDRLLTPQTEIPSDFIERQL

SEQ ID NO: 4975 - protein, 177 aa, unidentified
  REGION 1..177: note = Description of Unknown: uncultivated organism with predicted taxonomy: Porphyromonas catoniae
  REGION 1..177: note = MG16-262 HNH domain
ELKQSKDERNETFKRNNQNERQNKEYAGRIKEYGLTPTRNRIMKMKMWEESEYTCMYCGQPVNVTEFLKGADVEREHIIPKSLLFDNSFTNQVCSCRRCNSKKGMRTAYDFIADDKGQEGLNAYIDRINNLFDKKKISRSKFNRLLVSHKAYISRKAQGKETEEDIELWENFIDRQL

SEQ ID NO: 4976 - protein, 177 aa, unidentified
  REGION 1..177: note = Description of Unknown: uncultivated organism with predicted taxonomy: Sediminibacterium sp. C3
  REGION 1..177: note = MG16-263 HNH domain
ELKQSKDERNETFRRNSQNEKKNKEFAEHIKEYNLTPTRNRILKWKLYEESDHSCMYCGQSINIRDFLQGADAEREHIVPRGLLFDNSFTNQVCACRSCNSKKGMRTAYDFIEDEKGEEGLHSYIEHINYLFNKKNISRSKFNRLLVSHKAYLKRKALGKETEEDKELWENFIDRQL

SEQ ID NO: 4977 - protein, 197 aa, unidentified
  REGION 1..197: note = Description of Unknown: uncultivated organism
  REGION 1..197: note = MG16-264 HNH domain
ELKQSKDDRNTTFLQNEAMEKLNEAIAKRLTSEGITPTKRIMEKYKFIFPTKGCIDKKTGKFVTKNFDALATVNQCIYCGKPFSLSAALNGEGYEIEHIIPRDMICDNSQSNKVLSCRSCNSKKSNKTEFDFMRSQDKAVFDDYIKRVEKWFDDGIISPSKRERLLLSHEDYLERKKKGKTTEEDKKYWEEFVSRQA

SEQ ID NO: 4978 - protein, 177 aa, unidentified
  REGION 1..177: note = Description of Unknown: uncultivated organism
  REGION 1..177: note = MG16-265 HNH domain
ELKQSKDERNETFKRNSQNERKNKEYAERIKEYGLTPTRNRIMKMKMWEESEHSCMYCGQPVDVKEFLQGADVEREHIVPRGLLFDNSFTNQVCSCRRCNSQKGMRTAYDFIEDDKGEAGLNSYIEHINYLFDKKQISRNKFNRLLVSHKAYINRKAQGKETEEDKELWENFIDRQL

SEQ ID NO: 4979 - protein, 160 aa, unidentified; identical to SEQ ID NO: 4909
  REGION 1..160: note = Description of Unknown: uncultivated organism with predicted taxonomy: Porphyromonas sp. oral taxon 278
  REGION 1..160: note = MG16-266 HNH domain

SEQ ID NO: 4980 - protein, 177 aa, unidentified
  REGION 1..177: note = Description of Unknown: uncultivated organism
  REGION 1..177: note = MG16-267 HNH domain
HLNKNKYQRNETFKRNNQNERQNKEYAGRIKEYGLTPTRNRIMKMKMWEESEYTCMYCGQPVNVTEFLKGADVEREHIIPKSLLFDNSFTNQVCSCRRCNSKKGMRTAYDFIADDKGQEGLNAYIDRINNLFDKKKISRSKFNRLLVSHKAYISRKAQGKETEEDIELWENFIDRQL

SEQ ID NO: 4981 - protein, 174 aa, unidentified
  REGION 1..174: note = Description of Unknown: uncultivated organism with predicted taxonomy: Prevotella
  REGION 1..174: note = MG16-268 HNH domain
ELKMDRESRHRKFTQNNSRKRQNEEYADKINEHGIIPTRNRVIKYRLWEEANMQCFYCGQPINITELLRDPTIEKEHIIPKALLLDNSYSNLVCSCRKCNQEKGARTAYDYMRQKSDLDAYIKRINKLAETQKISQTKRLHLLASYEDYLVRKRLGKATEEDRNLWEEFINRQL

SEQ ID NO: 4982 - protein, 177 aa, unidentified; identical to SEQ ID NO: 4932
  REGION 1..177: note = Description of Unknown: uncultivated organism with predicted taxonomy: Bacteroidales
  REGION 1..177: note = MG16-269 HNH domain

SEQ ID NO: 4983 - protein, 160 aa, unidentified
  REGION 1..160: note = Description of Unknown: uncultivated organism with predicted taxonomy: Bacteroidales
  REGION 1..160: note = MG16-270 HNH domain
ELKQSREERDNAYKAINKNERENAAIAAKIAEFGIRPSRSRIQKYKMWEESNHRCFYCGKTMDIAQFLNGADVEIEHIIPRSILFDDSYSNKVCACRDCNREKGNSTAMEYMEGKPTGEFEAYKQRVDEAFTEHRISKTKRDHLLWRRADIPQDFIERQL

SEQ ID NO: 4984 - protein, 160 aa, unidentified
  REGION 1..160: note = Description of Unknown: uncultivated organism with predicted taxonomy: Bacteroidales
  REGION 1..160: note = MG16-271 HNH domain
ELKQNKEERETTYKNNSKNERLNREITERIKEMGIRPSRMRVQKYKLWEESLHQCFYCGKTVGAAEFLSGADVEIEHIIPRSVLFDDSYSNKVCACRECNHAKNNQTAFDFMKAQSTDKFEAYKSRVDDAFKEKRISKTKRDHLLWGLEDIPQDFIDRQL

SEQ ID NO: 4985 - protein, 177 aa, unidentified
  REGION 1..177: note = Description of Unknown: uncultivated organism with predicted taxonomy: Bacteroides sp. CAG:770
  REGION 1..177: note = MG16-272 HNH domain
ELKQSKDERNEAFKRNNQNERQNKDYAERIKEYGLTPTRNRIMKMRMWEESEYTCMYCGQPVNVTEFLKGADVEREHIIPRGLLFDNSFTNQVCSCRRCNSKKGMRTAYDFIADEKGQEGLDTYIDRINDLFNRKKISRSKLNRLFVSYKAYMSRKAQGKETDEDKDLWENFIDRQL

SEQ ID NO: 4986 - protein, 177 aa, unidentified
  REGION 1..177: note = Description of Unknown: uncultivated organism with predicted taxonomy: Bacteroidetes
  REGION 1..177: note = MG16-273 HNH domain
ELKQSKDERNETFKRNNQNERQNKEYAERIKKYGLTPTRNRIMKLKMWEESEHACMYCEQPVDPIEFLKGADVEREHIIPRGLLFDNSFTNQVCSCRRCNSKKGMRTAYDFIADDKGQEGLNAYIEHINDLFDKKKISRSKLNRLLVSHKAYISRKAQGKETEEDKELWENFIDRQL

SEQ ID NO: 4987 - protein, 174 aa, unidentified
  REGION 1..174: note = Description of Unknown: uncultivated organism with predicted taxonomy: Bacteroidales
  REGION 1..174: note = MG16-274 HNH domain
ELKQSKEEREETDKGIRKQQKANEEYADILKKKGVRPTRNRILKYRLWKESEEACFYCGRDIDFHEFLRFSDIEREHVIPKKLLFDDSFANQVCSCRRCNAEKGGRTALDYMRTKPNLQEYLDKVDKMFQEHKIGGKKHTHLLASYDDYLSRKKEGKETKDDILIWEEPIDRQL

SEQ ID NO: 4988 - protein, 197 aa, unidentified
  REGION 1..197: note = Description of Unknown: uncultivated organism with predicted taxonomy: Bacteroidetes
  REGION 1..197: note = MG16-275 HNH domain
ELKQSKDDRNTTFLQNEAMEKLNEAIAKRLTSEGITPTKRIMEKYKFIFPTKGCIDKKTGKFVTKNFDALATVNQCIYCGKPFSLSAALNGEGYEIEHIIPRDMICDNSQSNKVLSCRSCNSKKSNKTAFDFMRSQDKAMFDDYIKRVEKWFDDGIISPSKRERLLLSHEDYMERKKKGKTTEEDKKYWEEFVSRQA

SEQ ID NO: 4989 - protein, 162 aa, unidentified
  REGION 1..162: note = Description of Unknown: uncultivated organism with predicted taxonomy: Clostridiales
  REGION 1..162: note = MG18-1 HNH domain
GVSPEQKNKRTVSRKDQLLALYKACKEDARDWCGELEALPEDKLRSDKLYLYYTQMGRCMYSGEPIRLDDLMHDTANQLYDIDHIYPQSKTKDDSLTNRVLVKRQLNAIKSNDYPLPQTMRQTALWKALLEKGLISKQKYLRLTRTTPFTEEELAGFINRQL

SEQ ID NO: 4990 - protein, 168 aa, unidentified
  REGION 1..168: note = Description of Unknown: uncultivated organism with predicted taxonomy: Phascolarctobacterium succinatutens
  REGION 1..168: note = MG18-3 HNH domain
SKEESKRTDSRLKKLQDLYKKCREENIDFMPRKDEFNALKTQLSSKKEDDLRSDKLYLYYTQMGRCMYTGERIELASLYDNNLYDIDHIYPRSKTKDDSLSNRVLVKKQVNAAKTDTYPLDAAIRIKMHSFWKLLYDKGFIDERKYERLTRSTQLRDEELAGFISRQL

SEQ ID NO: 4991 - protein, 168 aa, unidentified
  REGION 1..168: note = Description of Unknown: uncultivated organism with predicted taxonomy: Phascolarctobacterium succinatutens
  REGION 1..168: note = MG18-4 HNH domain
SKEESKRTDSRLKKLQDLYKKCREENIDFMPHTDELNAFKIQLSSKKEDDLRSDKLYLYYTQMGRCMYTGERIELASLYNDNLYDIDHIYPRSKTKDDSLSNRVLVKKEVNAAKTDIYPLDAAIRTKMHSFWKLLYDKGFIDERKYERLTRSTQLRDEELAGFISRQL

SEQ ID NO: 4992 - protein, 168 aa, unidentified
  REGION 1..168: note = Description of Unknown: uncultivated organism with predicted taxonomy: Phascolarctobacterium succinatutens
  REGION 1..168: note = MG18-5 HNH domain
SKEESKRTDSRLKKLQDLYKKCREENIDFMPRKDEFNTLKTQLSSKKEDDLRIDKLYLYYTQMGRCMYTGEKIELASLYDNNLYDIDHIYPRSKTKDDSLSNRVLVKKQVNAAKTDTYPLDAAIRTKMHSFWKLLYDKGFIDERKYERLTRSTQLRDEELAGFISRQL

SEQ ID NO: 4993 - protein, 168 aa, unidentified; identical to SEQ ID NO: 4990
  REGION 1..168: note = Description of Unknown: uncultivated organism with predicted taxonomy: Phascolarctobacterium
  REGION 1..168: note = MG18-6 HNH domain

SEQ ID NO: 4994 - protein, 168 aa, unidentified
  REGION 1..168: note = Description of Unknown: uncultivated organism with predicted taxonomy: Acidaminococcales
  REGION 1..168: note = MG18-7 HNH domain
SKEESLRTNSRLQRLQDLYKKCKEENIDFMPKADELTDIRSQLQCKNEEDLRSDKLYLYYTQMGRCMYTGERIELASLYDQNKYDVDHIYPRSKTKDDSLNNRVLVKKEINSAKTDNYPIDADIRKKMHAFWKMLYDKGFIDQKKYERLTRSTQLTDEELAGFINRQL

SEQ ID NO: 4995 - protein, 168 aa, unidentified
  REGION 1..168: note = Description of Unknown: uncultivated organism
  REGION 1..168: note = MG18-8 HNH domain
SKEESKRTDSRLKKLQDLYKKCKEENIDFVPRKDEFNALKTQLSSKKEDDLRSDKLYLYYTQMGRCMYTGERIELASLYDNNLYDIDHIYPRSKTKDDSLSNRVLVKKQVNAAKTDTYPLDAAIRIKMHSFWKLLYDKGFIDERKYERLTRSTQLRDEELAGFISRQL

SEQ ID NO: 4996 - protein, 168 aa, unidentified
  REGION 1..168: note = Description of Unknown: uncultivated organism with predicted taxonomy: Phascolarctobacterium succinatutens
  REGION 1..168: note = MG18-9 HNH domain
SKEESKRTDSRLKKLQDLYKKCREENIDFMPRKDEFNTLKTQLNSKKEDDLRSDKLYLYYTQMGRCMYTGEKIELASLYDNNLYDIDHIYPRSKTKDDSLSNRVLVKKQVNAAKTDTYPLDAAIRTKMHSFWKLLYDKGFIDERKYQRLTRSTQLRDEELAGFISRQL

SEQ ID NO: 4997 - protein, 168 aa, unidentified; identical to SEQ ID NO: 4996
  REGION 1..168: note = Description of Unknown: uncultivated organism with predicted taxonomy: Phascolarctobacterium
  REGION 1..168: note = MG18-10 HNH domain

SEQ ID NO: 4998 - protein, 168 aa, unidentified
  REGION 1..168: note = Description of Unknown: uncultivated organism with predicted taxonomy: Phascolarctobacterium succinatutens
  REGION 1..168: note = MG18-11 HNH domain
SKEESKRTDSRLKKLQDLYKKCREENIDFMPRKDEFNALKTQLSSKKEEDLRSDKLYLYYTQMGRCMYTGERIELASLYDNNLYDIDHIYPRSKTKDDSLSNRVLVKKQVNAAKTDTYPLDAAIRTKMHSFWKLLYDKGFIDERKYERLTRSTQLRDEELAGFISRQL

SEQ ID NO: 4999 - protein, 168 aa, unidentified
  REGION 1..168: note = Description of Unknown: uncultivated organism with predicted taxonomy: Phascolarctobacterium succinatutens
  REGION 1..168: note = MG18-12 HNH domain
SKEESKRTDSRLKKLQDLYKKCKEENIDFMPRKDEFNALKTQLSSKKEDDLRSDKLYLYYTQMGRCMYTGERIELASLNDNNLYDIDHIYPRSKTKDDSLSNRVLVKKQVNAAKTDTYPLDAAIRIKMHSFWKLLYDKGFIDERKYERLTRSTQLRDEELAGFISRQL

SEQ ID NO: 5000 - protein, 168 aa, unidentified; identical to SEQ ID NO: 4991
  REGION 1..168: note = Description of Unknown: uncultivated organism with predicted taxonomy: Phascolarctobacterium succinatutens
  REGION 1..168: note = MG18-13 HNH domain

SEQ ID NO: 5001 - protein, 168 aa, unidentified; identical to SEQ ID NO: 4996
  REGION 1..168: note = Description of Unknown: uncultivated organism with predicted taxonomy: Phascolarctobacterium
  REGION 1..168: note = MG18-14 HNH domain

SEQ ID NO: 5002 - protein, 168 aa, unidentified
  REGION 1..168: note = Description of Unknown: uncultivated organism with predicted taxonomy: Phascolarctobacterium succinatutens
  REGION 1..168: note = MG18-15 HNH domain
SKEESKRTDSRLKKLQDLYKKCREENIDFMPRKDEFNVLKTQLSSKNEEDLRSDKLYLYYTQMGRCMYTGEIIELASLYDNNLYDIDHIYPRSKTKDDSLSNRVLVKKQVNAAKTDIYPLDAAIRTKMHSFWKLLYDKGFIDERKYERLTRSMQLRDEELAGFISRQL

SEQ ID NO: 5003 - protein, 168 aa, unidentified; identical to SEQ ID NO: 4999
  REGION 1..168: note = Description of Unknown: uncultivated organism with predicted taxonomy: Phascolarctobacterium succinatutens
  REGION 1..168: note = MG18-16 HNH domain

SEQ ID NO: 5004 - protein, 168 aa, unidentified; identical to SEQ ID NO: 4996
  REGION 1..168: note = Description of Unknown: uncultivated organism with predicted taxonomy: Phascolarctobacterium
  REGION 1..168: note = MG18-17 HNH domain

SEQ ID NO: 5005 - protein, 168 aa, unidentified; identical to SEQ ID NO: 4996
  REGION 1..168: note = Description of Unknown: uncultivated organism with predicted taxonomy: Phascolarctobacterium succinatutens
  REGION 1..168: note = MG18-18 HNH domain

SEQ ID NO: 5006 - protein, 168 aa, unidentified; identical to SEQ ID NO: 4996
  REGION 1..168: note = Description of Unknown: uncultivated organism with predicted taxonomy: Phascolarctobacterium
  REGION 1..168: note = MG18-19 HNH domain

SEQ ID NO: 5007 - protein, 168 aa, unidentified; identical to SEQ ID NO: 4996
  REGION 1..168: note = Description of Unknown: uncultivated organism with predicted taxonomy: Phascolarctobacterium
  REGION 1..168: note = MG18-20 HNH domain

SEQ ID NO: 5008 - protein, 168 aa, unidentified; identical to SEQ ID NO: 4996
  REGION 1..168: note = Description of Unknown: uncultivated organism with predicted taxonomy: Phascolarctobacterium
  REGION 1..168: note = MG18-21 HNH domain

SEQ ID NO: 5009 - protein, 168 aa, unidentified; identical to SEQ ID NO: 4991
  REGION 1..168: note = Description of Unknown: uncultivated organism with predicted taxonomy: Phascolarctobacterium
  REGION 1..168: note = MG18-22 HNH domain

SEQ ID NO: 5010 - protein, 168 aa, unidentified
  REGION 1..168: note = Description of Unknown: uncultivated organism with predicted taxonomy: Phascolarctobacterium succinatutens
  REGION 1..168: note = MG18-23 HNH domain
SKEESKRTDSRLKKLQDLYKKCREENIDFMPRKDEFNALKTQLSSKKEEDLRSDKLYLYYTQMGRCMYTGERIELASLYDNNLYDIDHIYPRSKTKDDSLSNRVLVKKQINAAKTDTYPLDAAIRTKMHSFWKLLYDKGFIDERKYERLTRSTQLRDEELAGFISRQL

SEQ ID NO: 5011 - protein, 168 aa, unidentified
  REGION 1..168: note = Description of Unknown: uncultivated organism with predicted taxonomy: Phascolarctobacterium
  REGION 1..168: note = MG18-24 HNH domain
SKEESKRTDSRLKKLQDLYKKCREENIDFMPRKDEFNALKTQLSSKKEENLRSDKLYLYYTQMGRCMYTGERIELASLYDNNLYDIDHIYPRSKTKDDSLSNRVLVKKQVNAAKTDTYPLDAAIRTKMHSFWKLLYDKGFIDERKYERLTRSTQLRDEELAGFISRQL

SEQ ID NO: 5012 - protein, 168 aa, unidentified; identical to SEQ ID NO: 4996
  REGION 1..168: note = Description of Unknown: uncultivated organism with predicted taxonomy: Phascolarctobacterium succinatutens
  REGION 1..168: note = MG18-25 HNH domain

SEQ ID NO: 5013 - protein, 168 aa, unidentified; identical to SEQ ID NO: 4996
  REGION 1..168: note = Description of Unknown: uncultivated organism with predicted taxonomy: Phascolarctobacterium succinatutens
  REGION 1..168: note = MG18-26 HNH domain

SEQ ID NO: 5014 - protein, 168 aa, unidentified; identical to SEQ ID NO: 5011
  REGION 1..168: note = Description of Unknown: uncultivated organism with predicted taxonomy: Phascolarctobacterium succinatutens
  REGION 1..168: note = MG18-27 HNH domain

SEQ ID NO: 5015 - protein, 168 aa, unidentified
  REGION 1..168: note = Description of Unknown: uncultivated organism with predicted taxonomy: Phascolarctobacterium
  REGION 1..168: note = MG18-28 HNH domain
SKEESKRTDSRLKKLQDLYKKCREENIDFMPRKDEFNALKTQLSSKKEEDLRSDKLYLYYTQMGRCMYTGERIELASLYDNNLYDIDHIYPRSKTKDDSLSNRVLVKKQVNAAKTDIYPLDAAIRTKMHSFWKLLYDKGFIDERKYERLTRSTQLRDEELAGFISRQL

SEQ ID NO: 5016 - protein, 168 aa, unidentified
  REGION 1..168: note = Description of Unknown: uncultivated organism with predicted taxonomy: Phascolarctobacterium succinatutens
  REGION 1..168: note = MG18-29 HNH domain
SKEESKRTDSRLKKLQDLYKKCREENIDFMPRKDEFNTLKTQLSSKKEDDLRSDKLYLYYTQMGRCMYTGEKIELASLYDNNLYDIDHIYPRSKTKDDSLSNRVLVKKQVNAAKTDTYPLDAAIRTKMHSFWKLLYDKGFIDERKYQRLTRSTQLRDEELAGFISRQL

SEQ ID NO: 5017 - protein, 168 aa, unidentified
  REGION 1..168: note = Description of Unknown: uncultivated organism with predicted taxonomy: Phascolarctobacterium succinatutens
  REGION 1..168: note = MG18-30 HNH domain
SKEESKRTDSRLKKLQDLYKKCREENIDFMPRKDEFNALKTQLSSKKEEDLRSDKLYLYYTQMGRCMYTGERIELASLYDDNLYDIDHIYPRSKTKDDSLSNRVLVKKEVNAAKTDIYPLDAAIRTKMHSFWKLLYDKGFIDERKYERLTRSTQLRDEELAGFISRQL

SEQ ID NO: 5018 - protein, 168 aa, unidentified; identical to SEQ ID NO: 5017
  REGION 1..168: note = Description of Unknown: uncultivated organism with predicted taxonomy: Phascolarctobacterium succinatutens
  REGION 1..168: note = MG18-31 HNH domain

SEQ ID NO: 5019 - protein, 168 aa, unidentified
  REGION 1..168: note = Description of Unknown: uncultivated organism with predicted taxonomy: Phascolarctobacterium succinatutens
  REGION 1..168: note = MG18-32 HNH domain
SKEESKRTDSRLKKLQDLYKQCREENIDFMPRKDEFNTLKTQLSSKKEDDLRIDKLYLYYTQMGRCMYTGEIIELASLYDNNLYDIDHIYPRSKTKDDSLSNRVLVKKQVNAAKTDIYPLDAAIRTKMHSFWKLLYDKGFIDERKYERLTRSTQLRDEELAGFISRQL

SEQ ID NO: 5020 - protein, 168 aa, unidentified; identical to SEQ ID NO: 4996
  REGION 1..168: note = Description of Unknown: uncultivated organism with predicted taxonomy: Phascolarctobacterium succinatutens
  REGION 1..168: note = MG18-33 HNH domain

SEQ ID NO: 5021 - protein, 168 aa, unidentified; identical to SEQ ID NO: 4996
  REGION 1..168: note = Description of Unknown: uncultivated organism with predicted taxonomy: Phascolarctobacterium succinatutens
  REGION 1..168: note = MG18-34 HNH domain

SEQ ID NO: 5022 - protein, 168 aa, unidentified; identical to SEQ ID NO: 4999
  REGION 1..168: note = Description of Unknown: uncultivated organism with predicted taxonomy: Phascolarctobacterium succinatutens
  REGION 1..168: note = MG18-35 HNH domain

SEQ ID NO: 5023 - protein, 168 aa, unidentified; identical to SEQ ID NO: 4996
  REGION 1..168: note = Description of Unknown: uncultivated organism with predicted taxonomy: Phascolarctobacterium succinatutens
  REGION 1..168: note = MG18-36 HNH domain

SEQ ID NO: 5024 - protein, 168 aa, unidentified; identical to SEQ ID NO: 5011
  REGION 1..168: note = Description of Unknown: uncultivated organism with predicted taxonomy: Phascolarctobacterium succinatutens
  REGION 1..168: note = MG18-37 HNH domain

SEQ ID NO: 5025 - protein, 168 aa, unidentified; identical to SEQ ID NO: 5017
  REGION 1..168: note = Description of Unknown: uncultivated organism with predicted taxonomy: Phascolarctobacterium
  REGION 1..168: note = MG18-38 HNH domain

SEQ ID NO: 5026 - protein, 168 aa, unidentified
  REGION 1..168: note = Description of Unknown: uncultivated organism with predicted taxonomy: Phascolarctobacterium
  REGION 1..168: note = MG18-39 HNH domain
SKEESKRTDSRLKKLQDLYKKCREENIDFMPRKDEFNTLKTQLSSKKEDDLRIDKLYLYYTQMGRCMYTGEKIELASLYDNNLYDIDHIYPRSKTKDDSLSNRVLVKKQVNAAKTDTYPLDAAIRTKMHSFWKLLYDKGFIDERKYQRLTRSTQLRDEELAGFISRQL

SEQ ID NO: 5027 - protein, 168 aa, unidentified; identical to SEQ ID NO: 5016
  REGION 1..168: note = Description of Unknown: uncultivated organism with predicted taxonomy: Phascolarctobacterium succinatutens
  REGION 1..168: note = MG18-40 HNH domain

SEQ ID NO: 5028 - protein, 168 aa, unidentified
  REGION 1..168: note = Description of Unknown: uncultivated organism with predicted taxonomy: Phascolarctobacterium succinatutens
  REGION 1..168: note = MG18-41 HNH domain
SKEESKRTDSRLKKLQDLYKKCREENIDFMPRKDEFNALKIQLNSKKDYDLRSDKLYLYYTQMGRCMYTGERIELASLYDDNLYDIDHIYPRSKTKDDSLSNRVLVKKEVNAAKTDIYPLDAAIRTKMHSFWKLLYDKGLIDERKYERLTRSTQLRDEELAGFISRQL

SEQ ID NO: 5029 - protein, 168 aa, unidentified; identical to SEQ ID NO: 4990
  REGION 1..168: note = Description of Unknown: uncultivated organism with predicted taxonomy: Phascolarctobacterium succinatutens
  REGION 1..168: note = MG18-42 HNH domain

SEQ ID NO: 5030 - protein, 168 aa, unidentified; identical to SEQ ID NO: 4999
  REGION 1..168: note = Description of Unknown: uncultivated organism with predicted taxonomy: Phascolarctobacterium succinatutens
  REGION 1..168: note = MG18-43 HNH domain

SEQ ID NO: 5031 - protein, 168 aa, unidentified; identical to SEQ ID NO: 5002
  REGION 1..168: note = Description of Unknown: uncultivated organism with predicted taxonomy: Phascolarctobacterium succinatutens
  REGION 1..168: note = MG18-44 HNH domain

SEQ ID NO: 5032 - protein, 168 aa, unidentified; identical to SEQ ID NO: 5011
  REGION 1..168: note = Description of Unknown: uncultivated organism with predicted taxonomy: Phascolarctobacterium succinatutens
  REGION 1..168: note = MG18-45 HNH domain

SEQ ID NO: 5033 - protein, 168 aa, unidentified
  REGION 1..168: note = Description of Unknown: uncultivated organism with predicted taxonomy: Phascolarctobacterium
  REGION 1..168: note = MG18-46 HNH domain
SKEESKRTDSRLKKLQDLYKKCKEENIDFMPRKDEFNALKTQLSSKKEDDLRSDKLYLYYTQMGRCMYTGERIELASLYDNNLYDIDHIYPRSKTKDDSLSNRVLVKKQVNAAKTDTYPLDAAIRTKMHSFWKLLYDKGFIDERKYERLTRSTQLRDEELAGFISRQL

SEQ ID NO: 5034 - protein, 168 aa, unidentified; identical to SEQ ID NO: 4994
  REGION 1..168: note = Description of Unknown: uncultivated organism with predicted taxonomy: Phascolarctobacterium
  REGION 1..168: note = MG18-47 HNH domain

SEQ ID NO: 5035 - protein, 168 aa, unidentified
  REGION 1..168: note = Description of Unknown: uncultivated organism with predicted taxonomy: Phascolarctobacterium succinatutens
  REGION 1..168: note = MG18-48 HNH domain
SKEESKRTDSRLKKLQDLYKKCREENIDFMPRKDEFNALKTQLSSKKEENLRSDKLYLYYTQMGRCMYTGERIELASLDDNNLYDIDHIYPRSKTKDDSLSNRVLVKKQVNAAKTDTYPLDAAIRTKMHSFWKLLYDKGFIDERKYERLTRSTQLRDEELAGFISRQL

SEQ ID NO: 5036 - protein, 168 aa, unidentified; identical to SEQ ID NO: 5016
  REGION 1..168: note = Description of Unknown: uncultivated organism with predicted taxonomy: Phascolarctobacterium succinatutens
  REGION 1..168: note = MG18-49 HNH domain

SEQ ID NO: 5037 - protein, 168 aa, unidentified; identical to SEQ ID NO: 4996
  REGION 1..168: note = Description of Unknown: uncultivated organism with predicted taxonomy: Phascolarctobacterium succinatutens
  REGION 1..168: note = MG18-50 HNH domain

SEQ ID NO: 5038 - protein, 168 aa, unidentified
  REGION 1..168: note = Description of Unknown: uncultivated organism with predicted taxonomy: Phascolarctobacterium succinatutens
  REGION 1..168: note = MG18-51 HNH domain
SKEESKRTDSRLKKLQDLYKKCREENIDFMPRKDEFNALKTQLSSKKEEDLRSDKLYLYYTQMGRCMYTGERIELASLDDNNLYDIDHIYPRSKTKDDSLSNRVLVKKEVNAAKTDIYPLDAVIRTKMHSFWKLLYDKGFIDERKYERLTRSTQLRDEELAGFISRQL

SEQ ID NO: 5039 - protein, 168 aa, unidentified; identical to SEQ ID NO: 5011
  REGION 1..168: note = Description of Unknown: uncultivated organism with predicted taxonomy: Phascolarctobacterium succinatutens
  REGION 1..168: note = MG18-52 HNH domain

SEQ ID NO: 5040 - protein, 168 aa, unidentified
  REGION 1..168: note = Description of Unknown: uncultivated organism with predicted taxonomy: Firmicutes
  REGION 1..168: note = MG18-53 HNH domain
SKEESKRTDSRLKKLQDLYKKCREENIDFMPRKDEFNALKTQLSSKKEEDLRSDKLYLYYTQMGRCMYTGERIELASLYDNNLYDIDHIYPRSKTKDDSLSNRVLVKKQVNAAKTDIYPLDAAIRTKMHSFWKLLYDKGFIDERKYERLTRNTQLGDEELAGFISRQL

SEQ ID NO: 5041 - protein, 168 aa, unidentified
  REGION 1..168: note = Description of Unknown: uncultivated organism with predicted taxonomy: Phascolarctobacterium
  REGION 1..168: note = MG18-54 HNH domain
SKEESKRTDSRLKKLQDLYKQCKEENIDFMPHTDELNAFKIQLSSKKEDDLRSDKLYLYYTQMGRCMYTGERIEIASLYDDNLYDIDHIYPRSKTKDDSLSNRVLVKKEVNAAKTDIYPLDAAIRTKMHTFWKLLYDKGFIDERKYERLIRSKQLRDEELAGFISRQL

SEQ ID NO: 5042 - protein, 168 aa, unidentified; identical to SEQ ID NO: 5026
  REGION 1..168: note = Description of Unknown: uncultivated organism with predicted taxonomy: Phascolarctobacterium
  REGION 1..168: note = MG18-55 HNH domain

SEQ ID NO: 5043 - protein, 168 aa, unidentified; identical to SEQ ID NO: 4996
  REGION 1..168: note = Description of Unknown: uncultivated organism with predicted taxonomy: Phascolarctobacterium succinatutens
  REGION 1..168: note = MG18-56 HNH domain

SEQ ID NO: 5044 - protein, 168 aa, unidentified
  REGION 1..168: note = Description of Unknown: uncultivated organism with predicted taxonomy: Phascolarctobacterium succinatutens
  REGION 1..168: note = MG18-57 HNH domain
SKEESKRTDSRLKKLHDLYKKCREENIDFMPRKDEFNALKTQLSSKKEENLRSDKLYLYYTQMGRCMYTGERIELASLHDNNLYDIDHIYPRSKTKDDSLSNRVLVKKQINAAKTDTYPLDAAIRTKMHSFWKLLYDKGFIDERKYERLTRSTQLRDEELAGFISRQL

SEQ ID NO: 5045 - protein, 168 aa, unidentified
  REGION 1..168: note = Description of Unknown: uncultivated organism with predicted taxonomy: Phascolarctobacterium succinatutens
  REGION 1..168: note = MG18-58 HNH domain
SKEESKRTDSRLKKLQDLYKKCREENIDFMPRKDEFNALKTQLSSKKEEDLRSDKLYLYYTQMGRCMYTGERIELASLHDNNLYDIDHIYPRSKTKDDSLSNRVLVKKQVNAAKTDIYPLDAAIRTKMHSFWKLLYDKGFIDERKYERLTRSTQLRDEELAGFISRQL

SEQ ID NO: 5046 - protein, 168 aa, unidentified; identical to SEQ ID NO: 5040
  REGION 1..168: note = Description of Unknown: uncultivated organism with predicted taxonomy: Phascolarctobacterium succinatutens
  REGION 1..168: note = MG18-59 HNH domain

SEQ ID NO: 5047 - protein, 168 aa, unidentified; identical to SEQ ID NO: 5016
  REGION 1..168: note = Description of Unknown: uncultivated organism
  REGION 1..168: note = MG18-60 HNH domain

SEQ ID NO: 5048 - protein, 168 aa, unidentified; identical to SEQ ID NO: 5011
  REGION 1..168: note = Description of Unknown: uncultivated organism with predicted taxonomy: Phascolarctobacterium succinatutens
  REGION 1..168: note = MG18-61 HNH domain

SEQ ID NO: 5049 - protein, 168 aa, unidentified
  REGION 1..168: note = Description of Unknown: uncultivated organism with predicted taxonomy: Phascolarctobacterium succinatutens
  REGION 1..168: note = MG18-62 HNH domain
SKEESKRTDSRLKKLQDLYKKCREENIDFMPRKDEFNALKTQLSSKKEENLRSDKLYLYYTQMGRCMYTGERIELASLYDNNLYDIDHIYPRSKTKDDSLSNRVLVKKQVNAAKTDTYPLDAAIRIKMHSFWKLLYDKGFIDERKYERLTRSTQLRDEELAGFISRQL

SEQ ID NO: 5050 - protein, 168 aa, unidentified; identical to SEQ ID NO: 5011
  REGION 1..168: note = Description of Unknown: uncultivated organism
  REGION 1..168: note = MG18-63 HNH domain

SEQ ID NO: 5051 - protein, 168 aa, unidentified
  REGION 1..168: note = Description of Unknown: uncultivated organism with predicted taxonomy: Phascolarctobacterium succinatutens
  REGION 1..168: note = MG18-64 HNH domain
SKEESKRTDSRLKKLQYLYKKCREENIDFMPRKDEFNALKTQLSSKKEEDLRSDKLYLYYTQMGRCMYTGESIELASLYDNNLYDIDHIYPRSKTKDDSLSNRVLVQKQVNAAKTDIYPLDAAIRTKMHSFWNLLYDKGFIDERKYERLMRSTQLRDEELAGFISRQL

SEQ ID NO: 5052 - protein, 168 aa, unidentified; identical to SEQ ID NO: 5016
  REGION 1..168: note = Description of Unknown: uncultivated organism with predicted taxonomy: Firmicutes
  REGION 1..168: note = MG18-65 HNH domain

SEQ ID NO: 5053 - protein, 168 aa, unidentified; identical to SEQ ID NO: 5011
  REGION 1..168: note = Description of Unknown: uncultivated organism with predicted taxonomy: Phascolarctobacterium succinatutens
  REGION 1..168: note = MG18-66 HNH domain

SEQ ID NO: 5054 - protein, 168 aa, unidentified; identical to SEQ ID NO: 4998
  REGION 1..168: note = Description of Unknown: uncultivated organism
  REGION 1..168: note = MG18-67 HNH domain

SEQ ID NO: 5055 - protein, 168 aa, unidentified; identical to SEQ ID NO: 5016
  REGION 1..168: note = Description of Unknown: uncultivated organism with predicted taxonomy: Phascolarctobacterium succinatutens
  REGION 1..168: note = MG18-68 HNH domain

SEQ ID NO: 5056 - protein, 168 aa, unidentified
  REGION 1..168: note = Description of Unknown: uncultivated organism with predicted taxonomy: Phascolarctobacterium succinatutens
  REGION 1..168: note = MG18-69 HNH domain
SKEESKRTDSRLKKLQDLYKKCREENIDFMPRKDEFNTLKTQLSSKKEDDLRSDKLYLYYTQMGRCMYTGEKIELASLYDNNLYDIDHIYPRSKTKDDSLSNRVLVKKQVNAAKTDIYPLDAAIRTKMHSFWKLLYDKGFIDERKYQRLTRSTQLRDEELAGFISRQL

SEQ ID NO: 5057 - protein, 168 aa, unidentified; identical to SEQ ID NO: 4995
  REGION 1..168: note = Description of Unknown: uncultivated organism with predicted taxonomy: Negativicutes
  REGION 1..168: note = MG18-70 HNH domain

SEQ ID NO: 5058 - protein, 168 aa, unidentified; identical to SEQ ID NO: 5016
  REGION 1..168: note = Description of Unknown: uncultivated organism with predicted taxonomy: Phascolarctobacterium succinatutens
  REGION 1..168: note = MG18-71 HNH domain

SEQ ID NO: 5059 - protein, 168 aa, unidentified
  REGION 1..168: note = Description of Unknown: uncultivated organism with predicted taxonomy: Phascolarctobacterium succinatutens
  REGION 1..168: note = MG18-72 HNH domain
SKEESKRTDSRLKKLQDLYKKCKEENIDFMPRKDEFNALKTQLSSKKEDDLRSDKLYLYYTQMGRCMYTGERIELASLYDNNLYDIDHIYPRSKTKDDSLSNRVLVKKQVNAAKTDTYPLDAAIRIKMHSFWKLLYDKGFIDERKYERLTRSTQLRDEELAGFISRQL

SEQ ID NO: 5060 - protein, 168 aa, unidentified; identical to SEQ ID NO: 5038
  REGION 1..168: note = Description of Unknown: uncultivated organism with predicted taxonomy: Phascolarctobacterium
  REGION 1..168: note = MG18-73 HNH domain

SEQ ID NO: 5061 - protein, 168 aa, unidentified; identical to SEQ ID NO: 5026
  REGION 1..168: note = Description of Unknown: uncultivated organism with predicted taxonomy: Phascolarctobacterium succinatutens
  REGION 1..168: note = MG18-74 HNH domain

SEQ ID NO: 5062 - protein, 168 aa, unidentified; identical to SEQ ID NO: 4990
  REGION 1..168: note = Description of Unknown: uncultivated organism with predicted taxonomy: Phascolarctobacterium
  REGION 1..168: note = MG18-75 HNH domain

SEQ ID NO: 5063 - protein, 168 aa, unidentified; identical to SEQ ID NO: 4992
  REGION 1..168: note = Description of Unknown: uncultivated organism with predicted taxonomy: Phascolarctobacterium succinatutens
  REGION 1..168: note = MG18-76 HNH domain

SEQ ID NO: 5064 - protein, 20 aa, unidentified
  REGION 1..20: note = Description of Unknown: uncultivated organism with predicted taxonomy: Clostridiales
  REGION 1..20: note = MG18-77 HNH domain
SKEESKRTDSRLKKLQGRKY

SEQ ID NO: 5065 - protein, 168 aa, unidentified; identical to SEQ ID NO: 5011
  REGION 1..168: note = Description of Unknown: uncultivated organism with predicted taxonomy: Phascolarctobacterium
  REGION 1..168: note = MG18-78 HNH domain

SEQ ID NO: 5066 - protein, 168 aa, unidentified
  REGION 1..168: note = Description of Unknown: uncultivated organism with predicted taxonomy: Phascolarctobacterium succinatutens
  REGION 1..168: note = MG18-79 HNH domain
SKEESKRTDSRLKKLQDLYKKRREENIDFMPRKDEFNALKTQLSSKKEENLRSDKLYLYYTQMGRCMYTGERIELASLHDNNLYDIDHIYPRSKTKDDSLSNRVLVKKQVNAAKTDTYPLDAAIRTKMHSFWKLLYDKGFIDERKYERLTRSTQLRDEELAGFISRQL

SEQ ID NO: 5067 - protein, 168 aa, unidentified; identical to SEQ ID NO: 5010
  REGION 1..168: note = Description of Unknown: uncultivated organism with predicted taxonomy: Phascolarctobacterium succinatutens
  REGION 1..168: note = MG18-80 HNH domain

SEQ ID NO: 5068 - protein, 168 aa, unidentified; identical to SEQ ID NO: 4994
  REGION 1..168: note = Description of Unknown: uncultivated organism with predicted taxonomy: Phascolarctobacterium succinatutens
  REGION 1..168: note = MG18-81 HNH domain

SEQ ID NO: 5069 - protein, 168 aa, unidentified; identical to SEQ ID NO: 4999
  REGION 1..168: note = Description of Unknown: uncultivated organism with predicted taxonomy: Phascolarctobacterium succinatutens
  REGION 1..168: note = MG18-82 HNH domain

SEQ ID NO: 5070 - protein, 168 aa, unidentified; identical to SEQ ID NO: 5015
  REGION 1..168: note = Description of Unknown: uncultivated organism with predicted taxonomy: Phascolarctobacterium succinatutens
  REGION 1..168: note = MG18-83 HNH domain

SEQ ID NO: 5071 - protein, 168 aa, unidentified
  REGION 1..168: note = Description of Unknown: uncultivated organism with predicted taxonomy: Phascolarctobacterium succinatutens
  REGION 1..168: note = MG18-84 HNH domain
SKEESKRTDSRLKKLQDLYKKCKEENIDFMPRKDEFNALKTQLSSKKEDDLRIDKLYLYYTQMGRCMYTGERIELASLYDNNLYDIDHIYPRSKTKDDSLSNRVLVKKQVNAAKTDTYPLDAAIRIKMHSFWKLLYDKGFIDERKYERLTRSTQLRDEELAGFISRQL

SEQ ID NO: 5072 - protein, 168 aa, unidentified; identical to SEQ ID NO: 5010
  REGION 1..168: note = Description of Unknown: uncultivated organism with predicted taxonomy: Phascolarctobacterium
  REGION 1..168: note = MG18-85 HNH domain

SEQ ID NO: 5073 - protein, 168 aa, unidentified; identical to SEQ ID NO: 4996
  REGION 1..168: note = Description of Unknown: uncultivated organism with predicted taxonomy: Phascolarctobacterium succinatutens
  REGION 1..168: note = MG18-86 HNH domain

SEQ ID NO: 5074 - protein, 168 aa, unidentified
  REGION 1..168: note = Description of Unknown: uncultivated organism with predicted taxonomy: Phascolarctobacterium succinatutens
  REGION 1..168: note = MG18-87 HNH domain
SKEESKRTDSRLKKLQDLYKKCREENIDFMPRKDEFNTLKTQLSSKKEDDLRSDKLYLYYTQMGRCMYTGEKIELASLYDNNLYDIDHIYPRSKTKDDSLSNRVLVKKQVNAAKTDTYPLDAAIRTKMHSFWKLLYDKGFIDERKYERLTRSTQLRDEELAGFISRQL

SEQ ID NO: 5075 - protein, 168 aa, unidentified; identical to SEQ ID NO: 4990
  REGION 1..168: note = Description of Unknown: uncultivated organism with predicted taxonomy: Phascolarctobacterium
  REGION 1..168: note = MG18-88 HNH domain

SEQ ID NO: 5076 - protein, 168 aa, unidentified
  REGION 1..168: note = Description of Unknown: uncultivated organism with predicted taxonomy: Firmicutes
  REGION 1..168: note = MG18-89 HNH domain
SKEESKRTDSRLKKLQDLYKKCREENIDFMPRKDEFNVLKTQLSSKKEEDLRSDKLYLYYTQMGRCMYTGERIELASLYDNNLYDIDHIYPRSKTKDDSLSNRVLVKKQINAAKTDTYPLDAAIRTKMHSFWKLLYDKGFIDERKYERLTRSTQLRDEELAGFISRQL

SEQ ID NO: 5077 - protein, 168 aa, unidentified; identical to SEQ ID NO: 5026
  REGION 1..168: note = Description of Unknown: uncultivated organism with predicted taxonomy: Phascolarctobacterium
  REGION 1..168: note = MG18-90 HNH domain

SEQ ID NO: 5078 - protein, 168 aa, unidentified; identical to SEQ ID NO: 5015
  REGION 1..168: note = Description of Unknown: uncultivated organism with predicted taxonomy: Phascolarctobacterium succinatutens
  REGION 1..168: note = MG18-91 HNH domain

SEQ ID NO: 5079 - protein, 168 aa, unidentified; identical to SEQ ID NO: 5056
  REGION 1..168: note = Description of Unknown: uncultivated organism with predicted taxonomy: Phascolarctobacterium succinatutens
  REGION 1..168: note = MG18-92 HNH domain

SEQ ID NO: 5080 - protein, 168 aa, unidentified; identical to SEQ ID NO: 4999
  REGION 1..168: note = Description of Unknown: uncultivated organism
  REGION 1..168: note = MG18-93 HNH domain

SEQ ID NO: 5081 - protein, 168 aa, unidentified; identical to SEQ ID NO: 5016
  REGION 1..168: note = Description of Unknown: uncultivated organism with predicted taxonomy: Phascolarctobacterium succinatutens
  REGION 1..168: note = MG18-94 HNH domain

SEQ ID NO: 5082 - protein, 168 aa, unidentified; identical to SEQ ID NO: 5016
  REGION 1..168: note = Description of Unknown: uncultivated organism
  REGION 1..168: note = MG18-95 HNH domain

SEQ ID NO: 5083 - protein, 168 aa, unidentified; identical to SEQ ID NO: 5056
  REGION 1..168: note = Description of Unknown: uncultivated organism with predicted taxonomy: Clostridium sp. CAG:964
  REGION 1..168: note = MG18-96 HNH domain

SEQ ID NO: 5084 - protein, 168 aa, unidentified; identical to SEQ ID NO: 5011
  REGION 1..168: note = Description of Unknown: uncultivated organism with predicted taxonomy: Phascolarctobacterium succinatutens
  REGION 1..168: note = MG18-97 HNH domain

SEQ ID NO: 5085 - protein, 168 aa, unidentified; identical to SEQ ID NO: 5015
  REGION 1..168: note = Description of Unknown: uncultivated organism with predicted taxonomy: Phascolarctobacterium succinatutens
  REGION 1..168: note = MG18-98 HNH domain

SEQ ID NO: 5086 - protein, 168 aa, unidentified; identical to SEQ ID NO: 4992
  REGION 1..168: note = Description of Unknown: uncultivated organism with predicted taxonomy: Firmicutes
  REGION 1..168: note = MG18-99 HNH domain

SEQ ID NO: 5087 - protein, 168 aa, unidentified; identical to SEQ ID NO: 4998
  REGION 1..168: note = Description of Unknown: uncultivated organism with predicted taxonomy: Phascolarctobacterium succinatutens
  REGION 1..168: note = MG18-100 HNH domain

SEQ ID NO: 5088 - protein, 168 aa, unidentified
  REGION 1..168: note = Description of Unknown: uncultivated organism with predicted taxonomy: Firmicutes
  REGION 1..168: note = MG18-101 HNH domain
SKEESKRTDSRLKKLQDLYKKCKEENIDFMPRKDEFNALKTQLSSKKEDDLRSDKLYLYYTQMGCCMYTGERIELASLYNDNLYDIDHIYPRSKTKDDSLSNRVLVKKEVNAAKTDIYPLDAAIRTKMHSFWKLLYDKGFIDERKYERLTRSTQLRDEELAGFISRQL

SEQ ID NO: 5089 - protein, 168 aa, unidentified
  REGION 1..168: note = Description of Unknown: uncultivated organism with predicted taxonomy: Firmicutes
  REGION 1..168: note = MG18-102 HNH domain
SKEESKRTDSRLKKLQDLYKKCREENIDFMPRKDEFNALKTQLSSKKEDDLRSDKLYLYYTQMGRCMYTGESIELASLYDNNLYDIDHIYPRSKTKDDSLSNRVLVKKQVNAAKTDIYPLDAAIRTKMHSFWKLLYDKGFIDERKYERLMRSTQLRDEELAGFISRQL

SEQ ID NO: 5090 - protein, 168 aa, unidentified
  REGION 1..168: note = Description of Unknown: uncultivated organism with predicted taxonomy: Phascolarctobacterium succinatutens
  REGION 1..168: note = MG18-103 HNH domain
SKEESKRTDSRLKKLQDLYKKCREENIDFMPRKDEFNALKTQLSSKKEEDLRSDKLYLYYTQMGRCMYTGERIELASLHDNNLYDIDHIYPRSKTKDDSLSNRVLVKKEVNAAKTDIYPLDAVIRTKMHSFWKLLYDKGFIDERKYERLTRSTQLRDEELAGFISRQL

SEQ ID NO: 5091 - protein, 168 aa, unidentified; identical to SEQ ID NO: 4998
  REGION 1..168: note = Description of Unknown: uncultivated organism with predicted taxonomy: Phascolarctobacterium
  REGION 1..168: note = MG18-104 HNH domain

SEQ ID NO: 5092 - protein, 168 aa, unidentified; identical to SEQ ID NO: 4998
  REGION 1..168: note = Description of Unknown: uncultivated organism with predicted taxonomy: Phascolarctobacterium succinatutens
  REGION 1..168: note = MG18-105 HNH domain

SEQ ID NO: 5093 - protein, 168 aa, unidentified; identical to SEQ ID NO: 4996
  REGION 1..168: note = Description of Unknown: uncultivated organism with predicted taxonomy: Firmicutes
  REGION 1..168: note = MG18-106 HNH domain

SEQ ID NO: 5094 - protein, 168 aa, unidentified
  REGION 1..168: note = Description of Unknown: uncultivated organism with predicted taxonomy: Phascolarctobacterium succinatutens
  REGION 1..168: note = MG18-107 HNH domain
SKEESKRTDSRLKKLQDLYKKCREENIDFMPRKDEFNAFKTQLSSKKEEDLRSDKLYLYYTQMGRCMYTGERIELASLHDNNLYDIDHIYPRSKTKDDSLSNRVLVKKQVNAAKTDTYPLDAAIRTKMHSFWKLLYDKGFIDERKYERLTRSTQLRDEELAGFISRQL

SEQ ID NO: 5095 - protein, 168 aa, unidentified; identical to SEQ ID NO: 4991
  REGION 1..168: note = Description of Unknown: uncultivated organism with predicted taxonomy: Ruminococcaceae bacterium
  REGION 1..168: note = MG18-108 HNH domain

SEQ ID NO: 5096 - protein, 168 aa, unidentified
  REGION 1..168: note = Description of Unknown: uncultivated organism with predicted taxonomy: Phascolarctobacterium succinatutens
  REGION 1..168: note = MG18-109 HNH domain
SKEESKRTDSRLKKLQDLYKKCREENIDFMPRKDEFNALKTQLSSKKEENLRSDKLYLYYTQMGRCMYTGERIELASLYDNNLYDIDHIYPRSKTKDDSLSNRVLVKKQINAAKTDTYPLDAAIRTKMHSFWKLLYDKGFIDERKYERLTRSTQLRDEELVGFISRQL

SEQ ID NO: 5097 - protein, 75 aa, unidentified
  REGION 1..75: note = Description of Unknown: uncultivated organism with predicted taxonomy: Clostridiales bacterium
  REGION 1..75: note = MG18-110 HNH domain
SKEESKRTDSRLKKLQDLYKKCREENIDFMPRKDEFNALKTQLSSKKEENLRSDKLYLYYTQMGRCMYTGERLSL

SEQ ID NO: 5098 - protein, 168 aa, unidentified; identical to SEQ ID NO: 4992
  REGION 1..168: note = Description of Unknown: uncultivated organism with predicted taxonomy: Phascolarctobacterium succinatutens
  REGION 1..168: note = MG18-111 HNH domain

SEQ ID NO: 5099 - protein, 168 aa, unidentified; identical to SEQ ID NO: 5074
  REGION 1..168: note = Description of Unknown: uncultivated organism with predicted taxonomy: Phascolarctobacterium succinatutens
  REGION 1..168: note = MG18-112 HNH domain

SEQ ID NO: 5100 - protein, 168 aa, unidentified
  REGION 1..168: note = Description of Unknown: uncultivated organism with predicted taxonomy: Clostridiales
  REGION 1..168: note = MG18-113 HNH domain
SKEESKRTDSRLKKLQDLYKKCREENIDFIPLKDEFNALKTQLSSKKEEDLRSDKLYLYYTQMGCCMYTGERIELASLYDNNLYDIDHIYPRSKTKDDSLSNRVLVKKQVNAAKTDIYPLDAAIRTKMHSFWKLLYDKGFIDERKYERLTRSTQLRDEELAGFISRQL

SEQ ID NO: 5101 - protein, 168 aa, unidentified
  REGION 1..168: note = Description of Unknown: uncultivated organism with predicted taxonomy: Phascolarctobacterium
  REGION 1..168: note = MG18-114 HNH domain
SKEESKRTDSRLKKLQDLYKKCREENIDFMPRKDEFNVLKTQLSSKNEEDLRSDKLYLYYTQMGRCMYTGEIIELASLNDNNLYDIDHIYPRSKTKDDSLSNRVLVKKQVNAAKTDIYPLDAAIRTKMHSFWKLLYDKGFIDERKYERLTRSTQLRDEELAGFISRQL

SEQ ID NO: 5102 - protein, 168 aa, unidentified; identical to SEQ ID NO: 5038
  REGION 1..168: note = Description of Unknown: uncultivated organism with predicted taxonomy: Phascolarctobacterium succinatutens
  REGION 1..168: note = MG18-115 HNH domain

SEQ ID NO: 5103 - protein, 168 aa, unidentified; identical to SEQ ID NO: 5015
  REGION 1..168: note = Description of Unknown: uncultivated organism with predicted taxonomy: Phascolarctobacterium succinatutens
  REGION 1..168: note = MG18-116 HNH domain

SEQ ID NO: 5104 - protein, 168 aa, unidentified; identical to SEQ ID NO: 5011
  REGION 1..168: note = Description of Unknown: uncultivated organism with predicted taxonomy: Phascolarctobacterium
  REGION 1..168: note = MG18-117 HNH domain

SEQ ID NO: 5105 - protein, 168 aa, unidentified
  REGION 1..168: note = Description of Unknown: uncultivated organism with predicted taxonomy: Phascolarctobacterium succinatutens
  REGION 1..168: note = MG18-118 HNH domain
SKEESKRTDSRLKKLQDLYKKCREENIDFMPRKDEFNTLKTQLSSKKEDDLRSDKLYLYYTQMGRCMYTGEKIELASLYDNNLYDIDHIYPRSKTKDDSLSNRVLVKKQVNAAKTDIYPLDAAIRTKMHSFWKILYDKGFIDERKYQRLTRSTQLRDEELAGFISRQL

SEQ ID NO: 5106 - protein, 168 aa, unidentified; identical to SEQ ID NO: 5016
  REGION 1..168: note = Description of Unknown: uncultivated organism with predicted taxonomy: Phascolarctobacterium succinatutens
  REGION 1..168: note = MG18-119 HNH domain

SEQ ID NO: 5107 - protein, 168 aa, unidentified; identical to SEQ ID NO: 5056
  REGION 1..168: note = Description of Unknown: uncultivated organism with predicted taxonomy: Phascolarctobacterium succinatutens
  REGION 1..168: note = MG18-120 HNH domain

SEQ ID NO: 5108 - protein, 168 aa, unidentified; identical to SEQ ID NO: 5038
  REGION 1..168: note = Description of Unknown: uncultivated organism with predicted taxonomy: Phascolarctobacterium succinatutens
  REGION 1..168: note = MG18-121 HNH domain

SEQ ID NO: 5109 - protein, 168 aa, unidentified
  REGION 1..168: note = Description of Unknown: uncultivated organism with predicted taxonomy: Phascolarctobacterium
  REGION 1..168: note = MG18-122 HNH domain
SKEESKRTDSRLKKLQDLYKKCREENIDFMHRKDEFNALKTQLSSKKEEDLRSDKLYLYYTQMGRCMYTGERIELASLYDNNLYDIDHIYPRSKTKDDSLSNRVLVKKQVNAAKTDIYPLDAAISTKMHSFWKLLYDKGFIDERKYERLTRSTQLRDEELAGFISRQL

SEQ ID NO: 5110 - protein, 168 aa, unidentified; identical to SEQ ID NO: 5011
  REGION 1..168: note = Description of Unknown: uncultivated organism with predicted taxonomy: Phascolarctobacterium succinatutens
  REGION 1..168: note = MG18-123 HNH domain

SEQ ID NO: 5111 - protein, 168 aa, unidentified
  REGION 1..168: note = Description of Unknown: uncultivated organism with predicted taxonomy: Phascolarctobacterium succinatutens
  REGION 1..168: note = MG18-124 HNH domain
SKEESKRTDSRLKKLQDLYKKCREENIDFMPRKDEFNALKTMLSSQKEEDLRSDKLYLYYTQMGRCMYTGERIELASLYDNNLYDIDHIYPRSKTKDDSLSNRVLVKKQVNAAKTDTYPLDAAIRTKMHSFWKLLYDKGFIDERKYERLTRSTQLRDEELAGFISRQL

SEQ ID NO: 5112 - protein, 168 aa, unidentified; identical to SEQ ID NO: 5026
  REGION 1..168: note = Description of Unknown: uncultivated organism with predicted taxonomy: Phascolarctobacterium
  REGION 1..168: note = MG18-125 HNH domain

SEQ ID NO: 5113 - protein, 168 aa, unidentified; identical to SEQ ID NO: 5100
  REGION 1..168: note = Description of Unknown: uncultivated organism with predicted taxonomy: Phascolarctobacterium
  REGION 1..168: note = MG18-126 HNH domain

SEQ ID NO: 5114 - protein, 168 aa, unidentified; identical to SEQ ID NO: 5071
  REGION 1..168: note = Description of Unknown: uncultivated organism with predicted taxonomy: Phascolarctobacterium
  REGION 1..168: note = MG18-127 HNH domain

SEQ ID NO: 5115 - protein, 168 aa, unidentified
  REGION 1..168: note = Description of Unknown: uncultivated organism with predicted taxonomy: Phascolarctobacterium
  REGION 1..168: note = MG18-128 HNH domain
SKEESKRTDSRLKKLQDLYKQCREENIDFMPHTDELNAFKIQLSSKKEDDLRSDKLYLYYTQMGRCMYTGEIIELASLYDNNLYDIDHIYPRSKTKDDSLSNRVLVKKQVNAAKTDIYPLDAAIRTKMHSFWKLLYDKGFIDERKYERLTRSTQLRDEELAGFISRQL

SEQ ID NO: 5116 - protein, 168 aa, unidentified
  REGION 1..168: note = Description of Unknown: uncultivated organism with predicted taxonomy: Phascolarctobacterium succinatutens
  REGION 1..168: note = MG18-129 HNH domain
SKEESKRTDSRLKKLQDLYKKCREENIDFMPRKDEFNVLKTQLSSKNEEDLRSDKLYLYYTQMGRCMYTGEIIELASLYDNNLYDIDHIYPRSKTKDDSLSNRVLVKKQVNAAKTDIYPLDAAIRTKMHSFWKLLYDKGFIDERKYERLTRSTQLRDEELAGFISRQL

SEQ ID NO: 5117 - protein, 168 aa, unidentified
  REGION 1..168: note = Description of Unknown: uncultivated organism with predicted taxonomy: Phascolarctobacterium succinatutens
  REGION 1..168: note = MG18-130 HNH domain
SKEESKRTDSRLKKLQDLYKKCREENIDFMPRKDEFNTLKTQLNSKKEDDLRRDKLYLYYTQMGRCMYTGEKIELASLYDNNLYDIDHIYPRSKTKDDSLSNRVLVKKQVNAAKTDTYPLDAAIRTKMHSFWKLLYDKGFIDERKYQRLTRSTQLRDEELAGFISRQL

SEQ ID NO: 5118 - protein, 168 aa, unidentified; identical to SEQ ID NO: 5015
  REGION 1..168: note = Description of Unknown: uncultivated organism with predicted taxonomy: Phascolarctobacterium succinatutens
  REGION 1..168: note = MG18-131 HNH domain

SEQ ID NO: 5119 - protein, 168 aa, unidentified; identical to SEQ ID NO: 5056
  REGION 1..168: note = Description of Unknown: uncultivated organism with predicted taxonomy: Phascolarctobacterium succinatutens
  REGION 1..168: note = MG18-132 HNH domain

SEQ ID NO: 5120 - protein, 168 aa, unidentified; identical to SEQ ID NO: 5109
  REGION 1..168: note = Description of Unknown: uncultivated organism with predicted taxonomy: Phascolarctobacterium succinatutens
  REGION 1..168: note = MG18-133 HNH domain

SEQ ID NO: 5121 - protein, 162 aa, unidentified
  REGION 1..162: note = Description of Unknown: uncultivated organism with predicted taxonomy: Clostridiales
  REGION 1..162: note = MG18-135 HNH domain
GASPEQKNKRTVSRKDQLLALYKACKEDARDWCSELEALPEDKLRSDKLYLYYTQMGRCMYSGELIRLDDLMHDTANQLYDIDHIYPQSKTKDDSLTNRVLVKRQLNAIKSNDYPLPQAMRQTALWKALLEKGLISKQKYLRLTRTTPFTGEELAGFINRQL

SEQ ID NO: 5122 - protein, 162 aa, unidentified
  REGION 1..162: note = Description of Unknown: uncultivated organism with predicted taxonomy: Clostridiales
  REGION 1..162: note = MG18-136 HNH domain
GASPEQKNKRTVSRKDQLLALYKACKEDARDWCGELEALPEDKLRSDKLYLYYTQMGRCMYSGEPIRLDDLMHDTANQLYDIDHIYPQSKTKDDSLTNRVLVKRQLNAIKSNDYPLPQAMRQTALWKALLEKGLISKQKYLRLTRTTPFTEEELAGFINRQL

SEQ ID NO: 5123 - protein, 162 aa, unidentified; identical to SEQ ID NO: 5122
  REGION 1..162: note = Description of Unknown: uncultivated organism with predicted taxonomy: Dorea sp. OM02-2LB
  REGION 1..162: note = MG18-137 HNH domain

SEQ ID NO: 5124 - protein, 168 aa, unidentified
  REGION 1..168: note = Description of Unknown: uncultivated organism with predicted taxonomy: Phascolarctobacterium
  REGION 1..168: note = MG18-138 HNH domain
SKEESKRTDSRLKKLQDLYKKCREENIDFMPRKDEFNALKTLLSSQKEEDLRSDKLYLYYTQMGRCMYTGERIELASLYDNNLYDIDHIYPRSKTKDDSLSNRVLVKKQVNAAKTDTYPLDAAIRTKMHSFWKLLYDKGFIDERKYERLTRSTQLRDEELAGFISRQL

SEQ ID NO: 5125 - protein, 168 aa, unidentified
  REGION 1..168: note = Description of Unknown: uncultivated organism with predicted taxonomy: Phascolarctobacterium succinatutens
  REGION 1..168: note = MG18-139 HNH domain
SKEESKRTDSRLKKLQELYKKCREENIDFMPRKDEFNALKTQLSSKKEENLRSDKLYLYYTQMGRCMYTGERIELASLYDNNLYDIDHIYPRSKTKDDSLSNRVLVKKQVNAAKTDTYPLDAAIRTKMHSFWKLLYDKGFIDERKYERLTRSTQLRDEELAGFISRQL

SEQ ID NO: 5126 - protein, 168 aa, unidentified; identical to SEQ ID NO: 5125
  REGION 1..168: note = Description of Unknown: uncultivated organism with predicted taxonomy: Phascolarctobacterium succinatutens
  REGION 1..168: note = MG18-140 HNH domain

SEQ ID NO: 5127 - protein, 168 aa, unidentified
  REGION 1..168: note = Description of Unknown: uncultivated organism with predicted taxonomy: Firmicutes
  REGION 1..168: note = MG18-141 HNH domain
SKEESKRTDSRLKKLQDLYKKCREENIDFMPRKDEFNALKTQLSSKKEEDLRSDKLYLYYTQMGRCMYTGERIELASLYNDNLYDIDHIYPRSKTKDDSLSNRVLVKKQVNAAKTDIYPLDAAIRTKMHSFWKLIYDKGFIDERKYERLTRSTQLRDEELAGFISRQL

SEQ ID NO: 5128 - protein, 168 aa, unidentified; identical to SEQ ID NO: 5056
  REGION 1..168: note = Description of Unknown: uncultivated organism with predicted taxonomy: Clostridium sp. CAG:964
  REGION 1..168: note = MG18-142 HNH domain

SEQ ID NO: 5129 - protein, 162 aa, unidentified; identical to SEQ ID NO: 5121
  REGION 1..162: note = Description of Unknown: uncultivated organism with predicted taxonomy: Clostridiales
  REGION 1..162: note = MG18-143 HNH domain

SEQ ID NO: 5130 - protein, 162 aa, unidentified; identical to SEQ ID NO: 5122
  REGION 1..162: note = Description of Unknown: uncultivated organism with predicted taxonomy: Firmicutes
  REGION 1..162: note = MG18-144 HNH domain

SEQ ID NO: 5131 - protein, 162 aa, unidentified; identical to SEQ ID NO: 5122
  REGION 1..162: note = Description of Unknown: uncultivated organism with predicted taxonomy: Dorea sp. OM02-2LB
  REGION 1..162: note = MG18-145 HNH domain

SEQ ID NO: 5132 - protein, 168 aa, unidentified; identical to SEQ ID NO: 5125
  REGION 1..168: note = Description of Unknown: uncultivated organism with predicted taxonomy: Phascolarctobacterium succinatutens
  REGION 1..168: note = MG18-146 HNH domain

SEQ ID NO: 5133 - protein, 168 aa, unidentified; identical to SEQ ID NO: 5125
  REGION 1..168: note = Description of Unknown: uncultivated organism with predicted taxonomy: Firmicutes
  REGION 1..168: note = MG18-147 HNH domain

SEQ ID NO: 5134 - protein, 168 aa, unidentified
  REGION 1..168: note = Description of Unknown: uncultivated organism with predicted taxonomy: Lactobacillus oryzae
  REGION 1..168: note = MG18-148 HNH domain
SKEESKRTDSRLKKLQDLYKKCREENIDFMPRKDEFNTLKTQLSSKKEDDLRIDKLYLYYTQMGRCMYTGEKIELASLYDNNLYDIDHIYPRSKTKDDSLSNRVLVKKQVNAAKTDIYPLDAAIRTKMHSFWKLLYDKGFIDERKYQRLTRSTQLRDEELAGFISRQL

SEQ ID NO: 5135 - protein, 168 aa, unidentified; identical to SEQ ID NO: 5017
  REGION 1..168: note = Description of Unknown: uncultivated organism with predicted taxonomy: Phascolarctobacterium
  REGION 1..168: note = MG18-149 HNH domain

SEQ ID NO: 5136 - protein, 168 aa, unidentified
  REGION 1..168: note = Description of Unknown: uncultivated organism with predicted taxonomy: Firmicutes
  REGION 1..168: note = MG18-150 HNH domain
SKEESKRTDSRLKKLQDLYKKCREENIDFMPRKDEFNALKTQLSSKKEEDLRSDKLYLYYTQMGRCMYTGERIELASLYDDNLYDIDHIYPRSKTKDDSLSNRVLVNKEVNAAKTDIYPLDAAIRTKMHSFWKLLYDKGFIDERKYERLTRSTQLRDEELAGFISRQL

SEQ ID NO: 5137 - protein, 168 aa, unidentified
  REGION 1..168: note = Description of Unknown: uncultivated organism with predicted taxonomy: Phascolarctobacterium
  REGION 1..168: note = MG18-151 HNH domain
SKEESKRTDSRLKKLQDLYKKCREENIDFMPHTDELNAFKIQLSSKKEDDLRSDKLYLYYTQMGRCMYTGERIELASLYNDNLYDIDHIYPRSKTKDDSLSNRVLVKKEVNAAKTDIYPLDAVIRTKMHSFWKLLYDKGFIDERKYERLTRSTQLRDEELAGFISRQL

SEQ ID NO: 5138 - protein, 168 aa, unidentified; identical to SEQ ID NO: 5017
  REGION 1..168: note = Description of Unknown: uncultivated organism with predicted taxonomy: Phascolarctobacterium succinatutens
  REGION 1..168: note = MG18-152 HNH domain

SEQ ID NO: 5139 - protein, 168 aa, unidentified; identical to SEQ ID NO: 5124
  REGION 1..168: note = Description of Unknown: uncultivated organism with predicted taxonomy: Firmicutes
  REGION 1..168: note = MG18-153 HNH domain

SEQ ID NO: 5140 - protein, 168 aa, unidentified; identical to SEQ ID NO: 5011
  REGION 1..168: note = Description of Unknown: uncultivated organism with predicted taxonomy: Phascolarctobacterium succinatutens
  REGION 1..168: note = MG18-154 HNH domain

SEQ ID NO: 5141 - protein, 168 aa, unidentified; identical to SEQ ID NO: 4996
  REGION 1..168: note = Description of Unknown: uncultivated organism with predicted taxonomy: Phascolarctobacterium succinatutens
  REGION 1..168: note = MG18-155 HNH domain

SEQ ID NO: 5142 - protein, 168 aa, unidentified; identical to SEQ ID NO: 5127
  REGION 1..168: note = Description of Unknown: uncultivated organism with predicted taxonomy: Clostridium sp. CAG:964
  REGION 1..168: note = MG18-156 HNH domain

SEQ ID NO: 5143 - protein, 168 aa, unidentified
  REGION 1..168: note = Description of Unknown: uncultivated organism with predicted taxonomy: Ruminococcaceae bacterium
  REGION 1..168: note = MG18-157 HNH domain
SKEESKRTDSRLKKLQDLYKKCREENIDFMPRKDEFNALKTQLSSKKEEDLRSDKLYLYYTQMGRCMYTGERIELASLYDNNLYDIDHIYPRSKTKDDSLSNRVLVKKEVNAAKTDIYPLDAVIRTKMHSFWKLLYDKGFIDERKYERLTRSTQLRDEELAGFISRQL

SEQ ID NO: 5144 - protein, 168 aa, unidentified; identical to SEQ ID NO: 4996
  REGION 1..168: note = Description of Unknown: uncultivated organism with predicted taxonomy: Clostridium sp. CAG:964
  REGION 1..168: note = MG18-158 HNH domain

SEQ ID NO: 5145 - protein, 168 aa, unidentified; identical to SEQ ID NO: 5026
  REGION 1..168: note = Description of Unknown: uncultivated organism with predicted taxonomy: Phascolarctobacterium succinatutens
  REGION 1..168: note = MG18-159 HNH domain

SEQ ID NO: 5146 - protein, 158 aa, unidentified
  REGION 1..158: note = Description of Unknown: uncultivated organism with predicted taxonomy: Clostridiales
  REGION 1..158: note = MG18-160 HNH domain
GPGEKKRTVSRKDALIELYKTLKSDERDWINEIAVQPEDRFRSDRLYFYYLQLGKCLYTGKPIDLDQIYNEMVYDVDHIYPQSKVKDDSLVNRVLVDSTKNKEKSDRYPIDKEIRDRMKPFWKMLLQQGFMEKEKYERLTRSTPFSDNELAEFIARQL

SEQ ID NO: 5147 - protein, 158 aa, unidentified
  REGION 1..158: note = Description of Unknown: uncultivated organism with predicted taxonomy: Firmicutes
  REGION 1..158: note = MG21-1 HNH domain
EMGKNFKDRGKIAKSQADHAAKNERIKAQISEYKSDHITGQDIVKFKLFKEQDGICLYSGKSLDIARLFEPGYVDVDHIIPYSISFDDSYNNKVLVLSSENRQKGNRIPYAYFGQNSDRWEKYETLVSNTVRSYRKRKNLLLKSLSEAQIDGFKQRNL

SEQ ID NO: 5148 - protein, 160 aa, unidentified
  REGION 1..160: note = Description of Unknown: uncultivated organism with predicted taxonomy: Roseburia sp. AM23-20
  REGION 1..160: note = MG21-3 HNH domain
DMKRNFADRQDIKSKQKDNWSENNRRREKVEEIKGSVATGQDIVKMKLYEDQNGVCLYSGKQLELHRLFEVGYAEVDHIVPYSKCFDDSYNNKVLVFSSENQRKGNRLPLEYMLAEGDEDKLDDYVTLVEANIKNTRKKQRLLKPCLTEQDITDWKARNL

SEQ ID NO: 5149 - protein, 160 aa, unidentified; identical to SEQ ID NO: 5148
  REGION 1..160: note = Description of Unknown: uncultivated organism with predicted taxonomy: Clostridiales
  REGION 1..160: note = MG21-4 HNH domain

SEQ ID NO: 5150 - protein, 160 aa, unidentified; identical to SEQ ID NO: 5148
  REGION 1..160: note = Description of Unknown: uncultivated organism
  REGION 1..160: note = MG21-5 HNH domain

SEQ ID NO: 5151 - protein, 160 aa, unidentified; identical to SEQ ID NO: 5148
  REGION 1..160: note = Description of Unknown: uncultivated organism
  REGION 1..160: note = MG21-6 HNH domain

SEQ ID NO: 5152 - protein, 157 aa, unidentified
  REGION 1..157: note = Description of Unknown: uncultivated organism with predicted taxonomy: Clostridium sp. CAG:571
  REGION 1..157: note = MG21-7 HNH domain
ELGKNFADRRTIEKRQSDNMQTNEKAKESIIALGKNNPTGKDIVKFKLWQDQDCKCIYSGKTIPVEELFTDLVDVDHIIPYSQCFDDSYNNKVLVLASENRQKGNRVPYKYLKESGKNLEEYEIRVNTLIRNNKKKQNLLRQDFTREDAEDWKERNL

SEQ ID NO: 5153 - protein, 159 aa, unidentified
  REGION 1..159: note = Description of Unknown: uncultivated organism with predicted taxonomy: Clostridiales
  REGION 1..159: note = MG21-8 HNH domain
EMHHSIKERNRMKKRQEENREKNEQVKAQILETKPGTRVTGLDIVKFKLYQEQDGICPYSGKPLLIERLYEPGYAEVDHIIPYSRCFDDSYSNKVLVLAEENQQKGNRTPYEYFGANEQRWHEFSARVRASVRDFKKRQKLLNTSFGEEQGKDFIQRNL

SEQ ID NO: 5154 - protein, 160 aa, unidentified
  REGION 1..160: note = Description of Unknown: uncultivated organism
  REGION 1..160: note = MG21-9 HNH domain
DMKRNFTDRQDIKKKQDSNWSYNDKIREKVEELKGSAATGQDIVKMKLYEEQDGYCLYSGKQLDIRRLFEVGYAEVDHIVPYSKCFDDSYNNKVLVFSSENQRKGNRLPLEYMLAEGDEDKLDDYVTLVEARIKNTRKKQRLLKPCLTAEDSNDWKERNL

SEQ ID NO: 5155 - protein, 157 aa, unidentified
  REGION 1..157: note = Description of Unknown: uncultivated organism with predicted taxonomy: Clostridiales
  REGION 1..157: note = MG21-10 HNH domain
ELGKNFADRRTIEKRQSDNMQTNEKAKESIIALGKNNPTGKDIVKFKLWQDQDCKCIYSGKTIPVEELFTDLVDVDHIIPYSQCFDDSYNNKVLVLASENRQKGNRVPYKYLKESGKNVEEYEIRVNTLIRNNKKKQNLLRQDFTREDAEDWKERNL

SEQ ID NO: 5156 - protein, 157 aa, unidentified
  REGION 1..157: note = Description of Unknown: uncultivated organism with predicted taxonomy: Clostridiales
  REGION 1..157: note = MG21-11 HNH domain
ELGKNFADRRTIEKRQSDNMQTNEKAKESIIALGKNNPTGKDIVKFKLWQDQDCKCIYSGKTIPVEELFTDLVDVDHIIPYSQCFDDSYNNKVLVLASENRQKGNRVPYKYLKESGKNLEEYEIRVNTLIRNNKKKQNLLRQDFTREDSEDWKERNL

SEQ ID NO: 5157 - protein, 160 aa, unidentified
  REGION 1..160: note = Description of Unknown: uncultivated organism with predicted taxonomy: Helicobacter sp. MIT 11-5569
  REGION 1..160: note = MG21-12 HNH domain
DMKRNFADRQDIKKKQDNNWSCNDRIRQKVEEYKGSAATGQDIVKMKLYEEQNGVCLYSGKQLDIHRLFEVGYAEVDHIVPYSKCFDDSYNNKVLVFSSENQSKGNRLPLEYMLAEGDEDKLDNYVTLVEAFIKNTRKRQRLLKPCLTAEDSSDWKERNL

SEQ ID NO: 5158 - protein, 157 aa, unidentified
  REGION 1..157: note = Description of Unknown: uncultivated organism with predicted taxonomy: Clostridium
  REGION 1..157: note = MG21-13 HNH domain
EMGKNFNDRSKIKKSQEENMQRNENIRQAIIELGKSNPTGQDIVKYKLWQEQDNFCVYSGKKITVDMLFTEAVDVDHIIPYSMCFDDTYNNKVLVLASENRQKGNRVPYKYEKEIGRNIDEYVVRVGNIIKNPKKLRRLLREDFTKEDAKDWKNRNI

SEQ ID NO: 5159 - protein, 157 aa, unidentified
  REGION 1..157: note = Description of Unknown: uncultivated organism with predicted taxonomy: Clostridiales
  REGION 1..157: note = MG21-14 HNH domain
ELGKSFKERQSIEKIYEENRTRNEKAIQEIRELGKTNVTGKDIVKYKLWKDQNEICIYSGKHIKVEDLFTDAVDIDHIIPYSQCFDDTYKNKVLVLASENRQKGNRTAYKYIKEAGKNLEEYEVRVNNYIKDYRKKERLLKADFSTEDAKNWKDRNI

SEQ ID NO: 5160 - protein, 157 aa, unidentified
  REGION 1..157: note = Description of Unknown: uncultivated organism
  REGION 1..157: note = MG21-15 HNH domain
EMGRNFKDRNIIKKSQEINMKNNEFVKERIVELGKENPRGQDIVKYKLWQEQDGVCIYSGKKIPIENLFTEAVDVDHIIPYSMCFDDTYNNKVLVLASENRQKGNRVPYKYEKEIGRDIEEYEVRVNNIIKNPYKRVKLLREDFTREDALEWKDRNI

SEQ ID NO: 5161 - protein, 160 aa, unidentified
  REGION 1..160: note = Description of Unknown: uncultivated organism
  REGION 1..160: note = MG21-16 HNH domain
DMKRNFTDRQDIKKKQDNNWSYNDRIRQKVEELKGSAATGQDIVKMKLYEEQNGVCLYSGKQLDIHRLFEVGYAEVDHIVPYSKCFDDSYNNKVLVFSSENQSKGNRLPLEYMLAEGDEDKLDNYVTLVEAFIKNTRKRQRLLKPCLTAEDSSDWKERNL

SEQ ID NO: 5162 - protein, 158 aa, unidentified
  REGION 1..158: note = Description of Unknown: uncultivated organism with predicted taxonomy: Clostridiales
  REGION 1..158: note = MG21-17 HNH domain
EMSQNFDDRRKAEKRQEENRAANERVKEQIAEYKGDRATGLDIVKFKLYREQDGVCLYSGKNLDIGRLFEPGYADVDHIIPYSRCFDDSYQNKVLVLASENRQKGNRLPYEYFGQDETRWHEYEVRVENLIRNYRKRQKLLKKQLTEEESTGFIDRNL

SEQ ID NO: 5163 - protein, 158 aa, unidentified
  REGION 1..158: note = Description of Unknown: uncultivated organism with predicted taxonomy: Clostridiales bacterium 42_27
  REGION 1..158: note = MG21-18 HNH domain
EMSRNFDDRRKAEKRQEENRAANERAKEQIVEYKGDCATGLDIVKFKLYREQDGVCLYSGQNLDLSRLFEPGYVDVDHIIPYSRCFDDSYQNKTLVLASENRQKGNRLPYEYFGQDEARWHEYEVRVENLIRNYRKRQRLLKKRLTEDESAGFIDRNL

SEQ ID NO: 5164 - protein, 182 aa, unidentified
  REGION 1..182: note = Description of Unknown: uncultivated organism
  REGION 1..182: note = MG21-19 HNH domain
DIKCGSRTRERIAQENEANRERREKLINEVENIKKQKHCEKVNATEQEILKLQLYKDQHGKCLYSGKELDKDKVISESGYAEIDHIIPYSQSFDNSEANKVLTLSEENRNKGNDVPVAYILRKHKNSEKEYDAFVKRVKSVTKEVSNTNKDRQKILEKRKQNLLISPNFKVDELEGLLVRET

SEQ ID NO: 5165 - protein, 158 aa, unidentified; identical to SEQ ID NO: 5162
  REGION 1..158: note = Description of Unknown: uncultivated organism with predicted taxonomy: Clostridiales
  REGION 1..158: note = MG21-20 HNH domain

SEQ ID NO: 5166 - protein, 157 aa, unidentified
  REGION 1..157: note = Description of Unknown: uncultivated organism with predicted taxonomy: Clostridiales bacterium 42_27
  REGION 1..157: note = MG21-21 HNH domain
ELGKNFADRKAIEKRQNDNMQTNEKAKESIIALGKNNPTGKDIVKFKLWQDQDCKCIYSGKTIPVEELFTDLVDVDHIIPYSQCFDDSYNNKVLVLASENRQKGNRVPYKYLKESGKNLEEYEIRVNTLIRNNKKKQNLLRQDFTREDAEDWKERNL

SEQ ID NO: 5167 - protein, 158 aa, unidentified
  REGION 1..158: note = Description of Unknown: uncultivated organism with predicted taxonomy: Clostridiales
  REGION 1..158: note = MG21-22 HNH domain
EMSRTFDERRKMEKRQDDNRAANERAKDQIAEYKGDHATGLDIVKFKLYQEQDGVCLYSGQNLDIARLFEPGYADVDHIIPYSRCFDDSYQNKVLVLASENRQKGNRLPYEYFGQDEARWHGYEVRVENLIHNYRKRQKLLKRRLTEEESTGFIDRNL

SEQ ID NO: 5168 - protein, 159 aa, unidentified
  REGION 1..159: note = Description of Unknown: uncultivated organism with predicted taxonomy: Roseburia inulinivorans
  REGION 1..159: note = MG21-23 HNH domain
EMHHSIKERNRMKKRQEENREKNEQVKAQILETKPGTRVTGLDIVKFKLYQEQKGFCPYSGVEIKKERLYEPGYAEVDHIIPYSRCFDDSYSNKVLVLAEENRQKGNRTPYEYFGADEQRWHEFSARVRASVRDFKKRQKLLNTSFGEEQGKDFIQRNL

SEQ ID NO: 5169 - protein, 159 aa, unidentified
  REGION 1..159: note = Description of Unknown: uncultivated organism with predicted taxonomy: Firmicutes
  REGION 1..159: note = MG21-24 HNH domain
EMHHSIKERNRMKKRQEENREKNEQVKAQILETKPGTRVTGLDIVKFKLYQEQDGICLYSGKPMEIERLYEPGYAEVDHIIPYSRCFDDSYSNKVLVLAEENRQKGNRTPYEYFGADEQRWHEFSARVRASVRDFKKRQKLLNTSFGEEQKNEFTQRNL

SEQ ID NO: 5170 - protein, 158 aa, unidentified
  REGION 1..158: note = Description of Unknown: uncultivated organism with predicted taxonomy: Clostridiales bacterium 42_27
  REGION 1..158: note = MG21-25 HNH domain
EMSRTFDERRKMEKRQDDNRAANEQAKDQIAEYKGDHATGLDIVKFKLYREQDGVCLYSGQNLDIARLFEPGYADVDHIIPYSRCFDDSYQNKVLVLASENRQKGNRLPYEYFGQDEARWHGYEVRVENLIHNYRKRQKLLKRRLTEEESSGFIDRNL

SEQ ID NO: 5171 - protein, 158 aa, unidentified; identical to SEQ ID NO: 5170
  REGION 1..158: note = Description of Unknown: uncultivated organism with predicted taxonomy: Ruminococcaceae bacterium TF06-43
  REGION 1..158: note = MG21-26 HNH domain

SEQ ID NO: 5172 - protein, 158 aa, unidentified
  REGION 1..158: note = Description of Unknown: uncultivated organism with predicted taxonomy: Clostridiales
  REGION 1..158: note = MG21-27 HNH domain
EMGKPYDVRTQITKKQEANAKKNEELRQQIKKIKGAEPTGQDIVKFKLFQDQNGVCLYSGQNLDITRLFEAGYVDVDHIIPYSISFDDSYTNKVLVRSPENRQKGNRIPADYFKSDPARWQRFETLVNTRVHNWKKKRNLLTQALSEEQKNGFKQRNL

SEQ ID NO: 5173 - protein, 158 aa, unidentified
  REGION 1..158: note = Description of Unknown: uncultivated organism with predicted taxonomy: Clostridiales bacterium 42_27
  REGION 1..158: note = MG21-28 HNH domain
EMSRTFDERRKMEKRQDDNRAANERAKDQIAEYKGDHATGLDIVKFKLYREQDGVCLYSGQNLDIARLFEPGYADVDHIIPYSRCFDDSYQNKVLVLASENRQKGNRLPYEYFGQDEARWHGYEVRVENLIHNYRKRQKLLKRRLTEEESSGFIDRNL

SEQ ID NO: 5174 - protein, 158 aa, unidentified
  REGION 1..158: note = Description of Unknown: uncultivated organism with predicted taxonomy: Firmicutes
  REGION 1..158: note = MG21-29 HNH domain
EMSRNFDERRKAEKRQDENRAANERAKEQIAEYKGDHATGLDIVKFKLYQEQDGVCLYSGKNLDPSRLFEPGYADVDHIVPYSRCFDDSYQNKVLVLASENRQKGNRLPYEYFGNDDVRWHEYEVRVENLIRNYRKRQKLLKRQLSEEESAGFIDRNL

SEQ ID NO: 5175 - protein, 158 aa, unidentified; identical to SEQ ID NO: 5170
  REGION 1..158: note = Description of Unknown: uncultivated organism with predicted taxonomy: Clostridiales bacterium 42_27
  REGION 1..158: note = MG21-30 HNH domain

SEQ ID NO: 5176 - protein, 159 aa, unidentified
  REGION 1..159: note = Description of Unknown: uncultivated organism
  REGION 1..159: note = MG21-31 HNH domain
EMHHSIKERNRMKKRQEENREKNEQVKAQILETKPGTRVTGLDIVKFKLYQEQDGICLYSGKPLEIERLYEPGYAEVDHIIPYSRCFDDSYSNKVLVLAEENQQKGNCTPYEYFGADEQRWHEFSVRVGASVRDFKKRQKLLNTSFGEEQGKDFIQRNL

SEQ ID NO: 5177 - protein, 158 aa, unidentified
  REGION 1..158: note = Description of Unknown: uncultivated organism with predicted taxonomy: Ruminococcaceae bacterium TF06-43
  REGION 1..158: note = MG21-32 HNH domain
EMSRNFDERRKAEKRQDENRAANERAKEQIAEYKGDHATGLDIVKFKLYQEQDGVCLYSGKNLDPSRLFEPGYADVDHIVPYSRCFDDSYQNKVLVLASENRQKGNLLPYEYFGYDEVRWHEYEVRVENLIRNYRKRQKLLKRQLSEEESAGFIDRNL

SEQ ID NO: 5178 - protein, 158 aa, unidentified
  REGION 1..158: note = Description of Unknown: uncultivated organism with predicted taxonomy: Clostridiales
  REGION 1..158: note = MG21-33 HNH domain
EMGKPYDVRTQMTKKQEANAKRNEELRQQIKKIKGAEPTGQDIVKFKLFQDQNGVCLYSGQNLDITRLFEAGYVDVDHIIPYSISFDDSYTNKVLVRSPENRQKGNRIPADYFKSDPARWQRFETLVNTQVHNWKKKRNLLTQALSEEQKNGFKQRNL

SEQ ID NO: 5179 - protein, 158 aa, unidentified
  REGION 1..158: note = Description of Unknown: uncultivated organism with predicted taxonomy: Clostridiales
  REGION 1..158: note = MG21-34 HNH domain
EMSRNFDERRKAEKRQDENRAANERAKEQIAEYKGDHATGLDIVKFKLYQEQDGVCLYSGKNLDPSRLFEPGYADVDHIVPYSRCFDDSYQNKVLVLASENRQKGNRLPYEYFGYDEVRWHEYEVRVENLIRNYRKRQKLLKRQLSEEESAEFIDRNL

SEQ ID NO: 5180 - protein, 158 aa, unidentified
  REGION 1..158: note = Description of Unknown: uncultivated organism with predicted taxonomy: Clostridiales
  REGION 1..158: note = MG21-35 HNH domain
EMSRTFDERRKMEKRQDDNRAANERAKNQIAEYKGDHATGLDIVKFKLYREQDGVCLYSGQNLDIARLFEPGYADVDHIIPYSRCFDDSYQNKVLVLASENRQKGNRLPYEYFGQDEARWHGYEVRVENLIHNYRKRQKLLKRRLTEEESTGFIDRNL

SEQ ID NO: 5181 - protein, 157 aa, unidentified
  REGION 1..157: note = Description of Unknown: uncultivated organism
  REGION 1..157: note = MG21-36 HNH domain
ELSKNFADRQNIKKNQENNMQSNEKAKEDILKLGKSNPTGQDIVKYKLWKEQDGTCVYSGKHISIEDLFTEAVDVDHIIPYSMCFDDTYKNKVLVLSSENRQKGNKIPYQYMQEKGRDLDEYEIRVNNIIKNYSKKQRLLKQKFTREDANEWKDRNI

SEQ ID NO: 5182 - protein, 158 aa, unidentified
  REGION 1..158: note = Description of Unknown: uncultivated organism with predicted taxonomy: Clostridiales
  REGION 1..158: note = MG21-37 HNH domain
EMSRTFDERRKMEKRQDDNRAANEQAKDQIAEYKGDHATGLDIVKFKLYREQDGVCLYSGQNLDIARLFEPGYADVDHIIPYSRCFDDSYQNKVLVLASENRQKGNRLPYEYFGQDEARWHGYEVRVENLIHNYRKRQKLLKRRLTEEESTGFIDRNL

SEQ ID NO: 5183 - protein, 158 aa, unidentified; identical to SEQ ID NO: 5173
  REGION 1..158: note = Description of Unknown: uncultivated organism with predicted taxonomy: Clostridiales bacterium 42_27
  REGION 1..158: note = MG21-38 HNH domain

SEQ ID NO: 5184 - protein, 158 aa, unidentified
  REGION 1..158: note = Description of Unknown: uncultivated organism with predicted taxonomy: Clostridiales
  REGION 1..158: note = MG21-39 HNH domain
EMSRNFDERRKAEKRQDENRAANERAKEQIAEYKGDHATGLDIVKFKLYQEQDGVCLYSGKNLDPSRLFEPGYADVDHIVPYSRCFDDSYQNKVLVLASENRQKGNRLPYEYFGYDEVRWHEYEVRVENLIRNYRKRQKLLKRQLSEEESAGFIDRNL

SEQ ID NO: 5185 - protein, 158 aa, unidentified
  REGION 1..158: note = Description of Unknown: uncultivated organism with predicted taxonomy: Clostridiales
  REGION 1..158: note = MG21-40 HNH domain
EMSQNFEKRRKTEKRQDENRTANEKAKEQIAEYKGDRATGLDIVKFKLYREQDGVCLYSGRNLDLSRLFEPGYVDVDHIIPYSRCFDDSYQNKVLVLASENRQKGNRLPYEYFGQDEARWHGYEVRVENLIRNYRKRQKLLKKRLTEEESAGFIDRNL

SEQ ID NO: 5186 - protein, 159 aa, unidentified
  REGION 1..159: note = Description of Unknown: uncultivated organism with predicted taxonomy: Firmicutes
  REGION 1..159: note = MG21-41 HNH domain
EMSHSFDERNKMKKRQEDGWQKNEQVKAQILETKTGTRVTGLDIVKFKLYQEQDGICLYSGTPMEIERLYEPGYADVDHIIPYSRCFDDSYSNKVLVLASENRQKGNRTPYEYFGANEQRWHEFSVRVGASVRDFKKRQKLLNTSFGEEQGKEFIQRNL

SEQ ID NO: 5187 - protein, 157 aa, unidentified
  REGION 1..157: note = Description of Unknown: uncultivated organism with predicted taxonomy: Clostridiales
  REGION 1..157: note = MG21-42 HNH domain
ELGKNFADRRTIEKRQSDNTQTNEKAKESIIALGKNNPTGKDIVKFKLWQDQDCKCIYSGKTIPVEELFTDLVDVDHIIPYSQCFDDSYNNKVLVLASENRQKGNRVPYKYLKESGKNLEEYEIRVNTLIRNSKKKQNLLRQDFTREDAEDWKERNL

SEQ ID NO: 5188 - protein, 158 aa, unidentified
  REGION 1..158: note = Description of Unknown: uncultivated organism with predicted taxonomy: Clostridiales bacterium 42_27
  REGION 1..158: note = MG21-43 HNH domain
EMSRTFDERRKMEKRQDDNRAANKRAKDQIAEYKGDHATGLDIVKFKLYQEQDGVCLYSGQNLDIARLFEPGYADVDHIIPYSRCFDDSYQNKVLVLASENRQKGNRLPYEYFGQDEARWHGYEVRVENLIHNYRKRQKLLKRRLTEEESSGFIDRNL

SEQ ID NO: 5189 - protein, 157 aa, unidentified
  REGION 1..157: note = Description of Unknown: uncultivated organism with predicted taxonomy: Clostridiales
  REGION 1..157: note = MG21-44 HNH domain
QLSKKFADRQNIKKKQEQNMQNNDKAREEILKLGKNNPTGQDIVKYKLWQEQDGICVYSGKHISIEDLFTEAVDVDHIIPYSMCFDDTYKNKVLVLASENRQKGNRIPYQYLKEKGRNLEEYEVRVNNIIKNYYKKKRLLRQNFTREDATEWKDRNI

SEQ ID NO: 5190 - protein, 158 aa, unidentified; identical to SEQ ID NO: 5170
  REGION 1..158: note = Description of Unknown: uncultivated organism with predicted taxonomy: Clostridiales
  REGION 1..158: note = MG21-45 HNH domain

SEQ ID NO: 5191 - protein, 157 aa, unidentified; identical to SEQ ID NO: 5187
  REGION 1..157: note = Description of Unknown: uncultivated organism with predicted taxonomy: Clostridiales
  REGION 1..157: note = MG21-46 HNH domain

SEQ ID NO: 5192 - protein, 158 aa, unidentified; identical to SEQ ID NO: 5172
  REGION 1..158: note = Description of Unknown: uncultivated organism with predicted taxonomy: Clostridiales
  REGION 1..158: note = MG21-47 HNH domain

SEQ ID NO: 5193 - protein, 158 aa, unidentified; identical to SEQ ID NO: 5182
  REGION 1..158: note = Description of Unknown: uncultivated organism with predicted taxonomy: Clostridiales bacterium 42_27
  REGION 1..158: note = MG21-48 HNH domain

SEQ ID NO: 5194 - protein, 158 aa, unidentified
  REGION 1..158: note = Description of Unknown: uncultivated organism with predicted taxonomy: Clostridiales bacterium 42_27
  REGION 1..158: note = MG21-49 HNH domain
EMSRTFDERRKMEKRQDDNRAANERAKDQIAEYKGDHATGLDIVKFKLYQEQDGVCLYSGQNLDIARLFEPGYADVDHIIPYSRCFDDSYQNKVLVLASENRQKGNRLPYEYFGQDEARWHGYEVRVENLIHNYRKRQKLLKRRLTEEESSGFIDRNL

SEQ ID NO: 5195 - protein, 158 aa, unidentified; identical to SEQ ID NO: 5173
  REGION 1..158: note = Description of Unknown: uncultivated organism with predicted taxonomy: Clostridiales bacterium 42_27
  REGION 1..158: note = MG21-50 HNH domain

SEQ ID NO: 5196 - protein, 158 aa, unidentified; identical to SEQ ID NO: 5173
  REGION 1..158: note = Description of Unknown: uncultivated organism with predicted taxonomy: Clostridiales bacterium 42_27
  REGION 1..158: note = MG21-51 HNH domain

SEQ ID NO: 5197 - protein, 158 aa, unidentified
  REGION 1..158: note = Description of Unknown: uncultivated organism with predicted taxonomy: Clostridiales bacterium 42_27
  REGION 1..158: note = MG21-52 HNH domain
EMSRTFDERRKMEKRQDDNRAANERAKDQIAEYKGDHATGLDIVKFKLYREQDGVCLYSGQNLDIARLFEPGYADVDHIIPYSRCFDDSYQNKVLVLASENRQKGNRLPYEYFGQDEARWHGYEVRVENLIHNYRKRQKLLKRRLTEEESTGFIDRNL

SEQ ID NO: 5198 - protein, 158 aa, unidentified
  REGION 1..158: note = Description of Unknown: uncultivated organism with predicted taxonomy: Clostridiales
  REGION 1..158: note = MG21-53 HNH domain
EMGKPYDVRTQITKKQEANAKKNEELRQQIKKIKGAEPTGQDIVKFKLFQEQKGVCLYSGQNLDITRLFEAGYVDVDHIVPYSISFDDSYTNKVLVRSPENRQKGNRIPADYFKSDPARWQRFETLVNTRVHNWKKKRNLLTQALSEEQKNGFKQRNL

SEQ ID NO: 5199 - protein, 158 aa, unidentified
  REGION 1..158: note = Description of Unknown: uncultivated organism with predicted taxonomy: Clostridiales
  REGION 1..158: note = MG21-54 HNH domain
EMSRTFDERRKMEKRQDDNRAANERAKDQISEYKGDHATGLDIVKFKLYREQDGVCLYSGQNLDIARLFEPGYADVDHIIPYSRCFDDSYQNKVLVLASENRQKGNRLPYEYFGQDEARWHGYEVRVENLIHNYRKRQKLLKRRLTEEESTGFIDRNL

SEQ ID NO: 5200 - protein, 159 aa, unidentified
  REGION 1..159: note = Description of Unknown: uncultivated organism with predicted taxonomy: Ruminococcaceae bacterium TF06-43
  REGION 1..159: note = MG21-55 HNH domain
EMHHSIKERNRMKKRQEENREKNEQVKAQILETKPGTRVTGLDIVKFKLYQEQDGICLYSGKPMEIERLYEPGYAEVDHIIPYSRCFDDSYSNKVLVLAKENQQKGNCTPYEYFGADEQRWHEFSARVRASVRDFKKRQKLLNTSFGEEQGKEFIQRNL

SEQ ID NO: 5201 - protein, 158 aa, unidentified; identical to SEQ ID NO: 5173
  REGION 1..158: note = Description of Unknown: uncultivated organism with predicted taxonomy: Clostridiales bacterium 42_27
  REGION 1..158: note = MG21-56 HNH domain

SEQ ID NO: 5202 - protein, 158 aa, unidentified
  REGION 1..158: note = Description of Unknown: uncultivated organism
  REGION 1..158: note = MG21-57 HNH domain
EMGKNFKDRRMIETRQTDNAAKNERIKAQISEYKSDHITGQDIVKFKLFKEQDGICLYSGKSLNIARLFEPGYVDIDHIIPYSISFDDSYNNKVLVLSSENRQKGNRIPYAYFGQNSDRWEKYETLVNNTVRSYRKRKNLLLKSLSEAQIDGFKQRNL

SEQ ID NO: 5203 - protein, 158 aa, unidentified
  REGION 1..158: note = Description of Unknown: uncultivated organism with predicted taxonomy: Oscillibacter sp. CAG:241_62_21
  REGION 1..158: note = MG21-58 HNH domain
EMSQNFDERRKAEKRREENRAANERAKEQILEYKGDRVTGLDIVKFKLFREQDGVCLYSGKNLDISRLFEPGYADVDHIIPYSRCFDDSYQNKVLVLASENRQKGNRLPYEYFGQDAARWHGYEVRVENLIRNYRKRQKLLKHHLTEEESAGFIARNL

SEQ ID NO: 5204 - protein, 158 aa, unidentified; identical to SEQ ID NO: 5203
  REGION 1..158: note = Description of Unknown: uncultivated organism with predicted taxonomy: Clostridiales
  REGION 1..158: note = MG21-59 HNH domain

SEQ ID NO: 5205 - protein, 158 aa, unidentified; identical to SEQ ID NO: 5173
  REGION 1..158: note = Description of Unknown: uncultivated organism with predicted taxonomy: Firmicutes
  REGION 1..158: note = MG21-60 HNH domain

SEQ ID NO: 5206 - protein, 158 aa, unidentified; identical to SEQ ID NO: 5179
  REGION 1..158: note = Description of Unknown: uncultivated organism with predicted taxonomy: Clostridiales
  REGION 1..158: note = MG21-61 HNH domain

SEQ ID NO: 5207 - protein, 158 aa, unidentified; identical to SEQ ID NO: 5182
  REGION 1..158: note = Description of Unknown: uncultivated organism with predicted taxonomy: Firmicutes bacterium CAG:129
  REGION 1..158: note = MG21-62 HNH domain

SEQ ID NO: 5208 - protein, 158 aa, unidentified; identical to SEQ ID NO: 5184
  REGION 1..158: note = Description of Unknown: uncultivated organism with predicted taxonomy: Clostridiales
  REGION 1..158: note = MG21-63 HNH domain

SEQ ID NO: 5209 - protein, 158 aa, unidentified; identical to SEQ ID NO: 5184
  REGION 1..158: note = Description of Unknown: uncultivated organism with predicted taxonomy: Clostridiales
  REGION 1..158: note = MG21-64 HNH domain

SEQ ID NO: 5210 - protein, 158 aa, unidentified; identical to SEQ ID NO: 5172
  REGION 1..158: note = Description of Unknown: uncultivated organism with predicted taxonomy: Clostridiales bacterium 42_27
  REGION 1..158: note = MG21-65 HNH domain

SEQ ID NO: 5211 - protein, 158 aa, unidentified; identical to SEQ ID NO: 5184
  REGION 1..158: note = Description of Unknown: uncultivated organism with predicted taxonomy: Clostridiales
  REGION 1..158: note = MG21-66 HNH domain

SEQ ID NO: 5212 - protein, 158 aa, unidentified; identical to SEQ ID NO: 5174
  REGION 1..158: note = Description of Unknown: uncultivated organism with predicted taxonomy: Clostridia
  REGION 1..158: note = MG21-67 HNH domain

SEQ ID NO: 5213 - protein, 158 aa, unidentified; identical to SEQ ID NO: 5194
  REGION 1..158: note = Description of Unknown: uncultivated organism with predicted taxonomy: Clostridiales
  REGION 1..158: note = MG21-68 HNH domain

SEQ ID NO: 5214 - protein, 159 aa, unidentified
  REGION 1..159: note = Description of Unknown: uncultivated organism with predicted taxonomy: Firmicutes
  REGION 1..159: note = MG21-69 HNH domain
EMHHSIKERNRMKKRQEENREKNEQVKAQILETKPGTRVTGLDIVKFKLHQEQKGFCPYSGVEIKKERLYEPGYAEVDHIIPYSRCFDDSYSNKVLVLAEENRQKGNRTPYEYFGADEQRWHEFSARVRASVQDFKKRQKLLNTSFGEEQKNEFTQRNL

SEQ ID NO: 5215 - protein, 159 aa, unidentified
  REGION 1..159: note = Description of Unknown: uncultivated organism with predicted taxonomy: Firmicutes
  REGION 1..159: note = MG21-70 HNH domain
EMSHSFDERNKMKKRQEDGWRKNEQVKAQILETKTGNRVTGLDIVKFKLYQEQKGFCPYSGVEIKKERLYEPGYAEVDHIIPYSRCFDDSYSNKVLVLAEENRQKGNRTPYEYFGADEQRWHEFSARVRASVRDFKKRQKLLNTSFGEEQGKDFIQRNL

SEQ ID NO: 5216 - protein, 159 aa, unidentified; identical to SEQ ID NO: 5169
  REGION 1..159: note = Description of Unknown: uncultivated organism with predicted taxonomy: Clostridiales
  REGION 1..159: note = MG21-71 HNH domain

SEQ ID NO: 5217 - protein, 159 aa, unidentified; identical to SEQ ID NO: 5168
  REGION 1..159: note = Description of Unknown: uncultivated organism
  REGION 1..159: note = MG21-72 HNH domain

SEQ ID NO: 5218 - protein, 158 aa, unidentified; identical to SEQ ID NO: 5177
  REGION 1..158: note = Description of Unknown: uncultivated organism with predicted taxonomy: Clostridiales
  REGION 1..158: note = MG21-73 HNH domain

SEQ ID NO: 5219 - protein, 159 aa, unidentified
  REGION 1..159: note = Description of Unknown: uncultivated organism with predicted taxonomy: Firmicutes
  REGION 1..159: note = MG21-74 HNH domain
EMSHSFDERNKIKKRQEDGRRKNEQIKAQILETKAGHRVTGLDIVKFKLFQEQDGVCPYSGKALDVQRLYEPGYADVDHIIPYSRCFDDSYSNKVLVLASENRQKGNCTPYEYFGADERRWHEFSVRVGASVRDFKKRQKLLNTSFGEEQGKEFIQRNL

SEQ ID NO: 5220 - protein, 157 aa, unidentified
  REGION 1..157: note = Description of Unknown: uncultivated organism with predicted taxonomy: Clostridiales
  REGION 1..157: note = MG21-75 HNH domain
ELSKNFADRQNIKKNQENNMQSNEKAKEDILKLGKSNPTGQDIVKYKLWKEQDGICVYSGKRISIEDLFTEAVDVDHIIPYSMCFDDTYKNKVLVLSSENRQKGNRIPYQYMQEKGRDLDEYEIRVNNIIKNYSKKQRLLKQKFTREDANEWKDRNI

SEQ ID NO: 5221 - protein, 158 aa, unidentified; identical to SEQ ID NO: 5194
  REGION 1..158: note = Description of Unknown: uncultivated organism with predicted taxonomy: Clostridiales bacterium 42_27
  REGION 1..158: note = MG21-76 HNH domain

SEQ ID NO: 5222 - protein, 158 aa, unidentified
  REGION 1..158: note = Description of Unknown: uncultivated organism with predicted taxonomy: Clostridiales
  REGION 1..158: note = MG21-77 HNH domain
EMGKPYDVRTQITKKQEANAKKNEEVKQKIREIKGLEPTGQDIVKFKLFQDQNGVCLYSGQSLDITRLFEAGYVDVDHIIPYSISFDDSYTNKVLVRSPENRQKGNRIPADYFKSDPARWQRFETLVNTRVHNWKKKRNLLTQALSEEQKNGFKQRNL

SEQ ID NO: 5223 - protein, 158 aa, unidentified; identical to SEQ ID NO: 5194
  REGION 1..158: note = Description of Unknown: uncultivated organism with predicted taxonomy: Clostridiales bacterium 42_27
  REGION 1..158: note = MG21-78 HNH domain

SEQ ID NO: 5224 - protein, 158 aa, unidentified; identical to SEQ ID NO: 5199
  REGION 1..158: note = Description of Unknown: uncultivated organism with predicted taxonomy: Clostridiales
  REGION 1..158: note = MG21-79 HNH domain

SEQ ID NO: 5225 - protein, 158 aa, unidentified
  REGION 1..158: note = Description of Unknown: uncultivated organism with predicted taxonomy: Clostridiales
  REGION 1..158: note = MG21-80 HNH domain
EMGKNFKDRRMIETRQTDNAAKNERIKAQISEYKSDHITGQDIVKFKLFKEQDGICLYSGKSLDIARLFEPGYVDIDHIIPYSISFDDSYNNKVLVQSSENRQKGNRIPYAYFGQNSDRWEKYETLVNNTVRSYRKRKNLLLKSLSEAQIDGFKQRNL

SEQ ID NO: 5226 - protein, 158 aa, unidentified
  REGION 1..158: note = Description of Unknown: uncultivated organism with predicted taxonomy: Clostridiales
  REGION 1..158: note = MG21-81 HNH domain
EMSQNFEERRKTEKRQDENRTANEKAKEQIAEYKGDRATGLDIVKFKLYREQDGVCLYSGRNLDLSRLFEPGYVDVDHIIPYSRCFDDSYQNKVLVLASENRQKGNRLPYEYFGQDETRWHEYEVRVENLIRNYRKRQKLLKKRLTEEESAGFIDRNL

SEQ ID NO: 5227 - protein, 158 aa, unidentified; identical to SEQ ID NO: 5194
  REGION 1..158: note = Description of Unknown: uncultivated organism with predicted taxonomy: Clostridiales bacterium 42_27
  REGION 1..158: note = MG21-82 HNH domain

SEQ ID NO: 5228 - protein, 158 aa, unidentified; identical to SEQ ID NO: 5194
  REGION 1..158: note = Description of Unknown: uncultivated organism with predicted taxonomy: Clostridiales bacterium 42_27
  REGION 1..158: note = MG21-83 HNH domain

SEQ ID NO: 5229 - protein, 158 aa, unidentified; identical to SEQ ID NO: 5184
  REGION 1..158: note = Description of Unknown: uncultivated organism with predicted taxonomy: Clostridiales
  REGION 1..158: note = MG21-84 HNH domain

SEQ ID NO: 5230 - protein, 158 aa, unidentified
  REGION 1..158: note = Description of Unknown: uncultivated organism with predicted taxonomy: Clostridiales
  REGION 1..158: note = MG21-85 HNH domain
EMGKSKADRDKIDAEQKANAKRNEELRQQIKKIKGAEPTGQDIVKFKLFQDQNGVCLYSGQNLDITRLFEAGYVEIDHIIPYSISLDNSYANKVLVLKEENQNKGRRTPYEYFGADSKRWQRFETLVNTQVHNWKKKRNLLTQALSEEQKNGFKQRNL

SEQ ID NO: 5231 - protein, 158 aa, unidentified; identical to SEQ ID NO: 5226
  REGION 1..158: note = Description of Unknown: uncultivated organism with predicted taxonomy: Firmicutes
  REGION 1..158: note = MG21-86 HNH domain

SEQ ID NO: 5232 - protein, 158 aa, unidentified; identical to SEQ ID NO: 5179
  REGION 1..158: note = Description of Unknown: uncultivated organism with predicted taxonomy: Clostridiales
  REGION 1..158: note = MG21-87 HNH domain

SEQ ID NO: 5233 - protein, 158 aa, unidentified; identical to SEQ ID NO: 5178
  REGION 1..158: note = Description of Unknown: uncultivated organism with predicted taxonomy: Clostridiales
  REGION 1..158: note = MG21-88 HNH domain

SEQ ID NO: 5234 - protein, 158 aa, unidentified; identical to SEQ ID NO: 5179
  REGION 1..158: note = Description of Unknown: uncultivated organism with predicted taxonomy: Clostridiales
  REGION 1..158: note = MG21-89 HNH domain

SEQ ID NO: 5235 - protein, 158 aa, unidentified; identical to SEQ ID NO: 5194
  REGION 1..158: note = Description of Unknown: uncultivated organism with predicted taxonomy: Clostridiales bacterium 42_27
  REGION 1..158: note = MG21-90 HNH domain

SEQ ID NO: 5236 - protein, 158 aa, unidentified; identical to SEQ ID NO: 5194
  REGION 1..158: note = Description of Unknown: uncultivated organism with predicted taxonomy: Clostridiales bacterium 42_27
  REGION 1..158: note = MG21-91 HNH domain

SEQ ID NO: 5237 - protein, 158 aa, unidentified; identical to SEQ ID NO: 5179
  REGION 1..158: note = Description of Unknown: uncultivated organism with predicted taxonomy: Ruminococcaceae bacterium TF06-43
  REGION 1..158: note = MG21-92 HNH domain

SEQ ID NO: 5238 - protein, 158 aa, unidentified; identical to SEQ ID NO: 5179
  REGION 1..158: note = Description of Unknown: uncultivated organism with predicted taxonomy: Ruminococcaceae bacterium TF06-43
  REGION 1..158: note = MG21-93 HNH domain

SEQ ID NO: 5239 - protein, 158 aa, unidentified; identical to SEQ ID NO: 5184
  REGION 1..158: note = Description of Unknown: uncultivated organism with predicted taxonomy: Clostridiales
  REGION 1..158: note = MG21-94 HNH domain

SEQ ID NO: 5240 - protein, 158 aa, unidentified; identical to SEQ ID NO: 5194
  REGION 1..158: note = Description of Unknown: uncultivated organism with predicted taxonomy: Clostridiales bacterium 42_27
  REGION 1..158: note = MG21-95 HNH domain

SEQ ID NO: 5241 - protein, 158 aa, unidentified; identical to SEQ ID NO: 5194
  REGION 1..158: note = Description of Unknown: uncultivated organism with predicted taxonomy: Clostridiales bacterium 42_27
  REGION 1..158: note = MG21-96 HNH domain

SEQ ID NO: 5242 - protein, 157 aa, unidentified; identical to SEQ ID NO: 5189
  REGION 1..157: note = Description of Unknown: uncultivated organism with predicted taxonomy: Clostridium
  REGION 1..157: note = MG21-97 HNH domain

SEQ ID NO: 5243 - protein, 160 aa, unidentified
  REGION 1..160: note = Description of Unknown: uncultivated organism with predicted taxonomy: Clostridiales
  REGION 1..160: note = MG21-98 HNH domain
EMGKSKADRDKIDAEQKANAKRNEELRQQIKKIKGAEPTGQDIVKFKLFQEQKGVCLYSGKNIEIDRLFKPEAGYVEIDHIIPYSISLDNSYANKVLVLKEENQNKGRRTPYEYFGADSKRWQRFETLVNTQVHNWKKKRNLLTQALSEEQKNGFKQRNL

SEQ ID NO: 5244 - protein, 158 aa, unidentified; identical to SEQ ID NO: 5173
  REGION 1..158: note = Description of Unknown: uncultivated organism with predicted taxonomy: Clostridiales bacterium 42_27
  REGION 1..158: note = MG21-99 HNH domain

SEQ ID NO: 5245 - protein, 158 aa, unidentified
  REGION 1..158: note = Description of Unknown: uncultivated organism with predicted taxonomy: Clostridiales
  REGION 1..158: note = MG21-100 HNH domain
EMSRNFDERRKAEKRQDENRAANERAKEQIAEYKGDHATGLDIVKFKLYQEQDGVYLYSGKNLDPSRLFEPGYADVDHIVPYSRCFDDSYQNKVLVLASENRQKGNRLPYEYFGYDEVRWHEYEVRVENLIRNYRKRQKLLKRQLSEEESAEFIDRNL

SEQ ID NO: 5246 - protein, 157 aa, unidentified
  REGION 1..157: note = Description of Unknown: uncultivated organism with predicted taxonomy: Clostridiales
  REGION 1..157: note = MG21-101 HNH domain
ELSKNFADRQNIKKNQENNMQSNEKAKEDILKLGKSNPTGQDIVKYKLWKEQDGTCVYSGKHISIEDLFTEAVDVDHIIPYSMCFDDTYKNKVLVLSSENRQKGNRIPYQYMQEKGRDLDEYEIRVNNIIKNYSKKQRLLKQKFTREDANEWKDRNI

SEQ ID NO: 5247 - protein, 157 aa, unidentified; identical to SEQ ID NO: 5189
  REGION 1..157: note = Description of Unknown: uncultivated organism with predicted taxonomy: Clostridium
  REGION 1..157: note = MG21-102 HNH domain

SEQ ID NO: 5248 - protein, 158 aa, unidentified
  REGION 1..158: note = Description of Unknown: uncultivated organism with predicted taxonomy: Clostridiales
  REGION 1..158: note = MG21-103 HNH domain
EMSRNFDERRKAEKRQDENRAANERAKEQIAEYKGDHATGLDIVKFKLYQEQDGVCLYSGKNLDPSRLFEPGYADVDHIVPYSRCFDDSYQNKVLVLASENRQKGNRLPYEYFGQDEARWHGYEVRVENLIRNYRKRQKLLKRQLSEEESAGFIDRNL

SEQ ID NO: 5249 - protein, 158 aa, unidentified; identical to SEQ ID NO: 5194
  REGION 1..158: note = Description of Unknown: uncultivated organism with predicted taxonomy: Clostridiales bacterium 42_27
  REGION 1..158: note = MG21-104 HNH domain

SEQ ID NO: 5250 - protein, 158 aa, unidentified; identical to SEQ ID NO: 5197
  REGION 1..158: note = Description of Unknown: uncultivated organism with predicted taxonomy: Clostridiales bacterium 42_27
  REGION 1..158: note = MG21-105 HNH domain

SEQ ID NO: 5251 - protein, 158 aa, unidentified; identical to SEQ ID NO: 5203
  REGION 1..158: note = Description of Unknown: uncultivated organism with predicted taxonomy: Oscillibacter sp. CAG:241_62_21
  REGION 1..158: note = MG21-106 HNH domain

SEQ ID NO: 5252 - protein, 157 aa, unidentified; identical to SEQ ID NO: 5189
  REGION 1..157: note = Description of Unknown: uncultivated organism with predicted taxonomy: Clostridium
  REGION 1..157: note = MG21-107 HNH domain

SEQ ID NO: 5253 - protein, 158 aa, unidentified; identical to SEQ ID NO: 5179
  REGION 1..158: note = Description of Unknown: uncultivated organism with predicted taxonomy: Clostridiales
  REGION 1..158: note = MG21-108 HNH domain

SEQ ID NO: 5254 - protein, 158 aa, unidentified; identical to SEQ ID NO: 5197
  REGION 1..158: note = Description of Unknown: uncultivated organism with predicted taxonomy: Clostridiales bacterium 42_27
  REGION 1..158: note = MG21-109 HNH domain

SEQ ID NO: 5255 - protein, 158 aa, unidentified; identical to SEQ ID NO: 5203
  REGION 1..158: note = Description of Unknown: uncultivated organism with predicted taxonomy: Oscillibacter sp. CAG:241_62_21
  REGION 1..158: note = MG21-110 HNH domain

SEQ ID NO: 5256 - protein, 158 aa, unidentified; identical to SEQ ID NO: 5248
  REGION 1..158: note = Description of Unknown: uncultivated organism with predicted taxonomy: Clostridiales
  REGION 1..158: note = MG21-111 HNH domain

SEQ ID NO: 5257 - protein, 158 aa, unidentified; identical to SEQ ID NO: 5173
  REGION 1..158: note = Description of Unknown: uncultivated organism with predicted taxonomy: Clostridiales bacterium 42_27
  REGION 1..158: note = MG21-112 HNH domain

SEQ ID NO: 5258 - protein, 158 aa, unidentified; identical to SEQ ID NO: 5194
  REGION 1..158: note = Description of Unknown: uncultivated organism with predicted taxonomy: Clostridiales bacterium 42_27
  REGION 1..158: note = MG21-113 HNH domain

SEQ ID NO: 5259 - protein, 158 aa, unidentified; identical to SEQ ID NO: 5197
  REGION 1..158: note = Description of Unknown: uncultivated organism with predicted taxonomy: Clostridiales bacterium 42_27
  REGION 1..158: note = MG21-114 HNH domain

SEQ ID NO: 5260 - protein, 158 aa, unidentified
  REGION 1..158: note = Description of Unknown: uncultivated organism with predicted taxonomy: Clostridiales
  REGION 1..158: note = MG21-115 HNH domain
EMGKPYDVRTQMTKKQETNAKRNEELRQQIKKIKGAEPTGQDIVKFKLFQDQNGVCLYSGQNLDITRLFEAGYVDVDHIIPYSISFDDSYTNKVLVRSPENRQKGNRIPADYFKSDPARWQRFETLVNTQVHNWKKKRNLLTQVLSEEQKNGFKQRNL

SEQ ID NO: 5261 - protein, 158 aa, unidentified; identical to SEQ ID NO: 5179
  REGION 1..158: note = Description of Unknown: uncultivated organism with predicted taxonomy: Clostridiales
  REGION 1..158: note = MG21-116 HNH domain

SEQ ID NO: 5262 - protein, 158 aa, unidentified; identical to SEQ ID NO: 5173
  REGION 1..158: note = Description of Unknown: uncultivated organism with predicted taxonomy: Clostridiales bacterium 42_27
  REGION 1..158: note = MG21-117 HNH domain

SEQ ID NO: 5263 - protein, 158 aa, unidentified; identical to SEQ ID NO: 5170
  REGION 1..158: note = Description of Unknown: uncultivated organism with predicted taxonomy: Clostridiales bacterium 42_27
  REGION 1..158: note = MG21-118 HNH domain

SEQ ID NO: 5264 - protein, 158 aa, unidentified; identical to SEQ ID NO: 5194
  REGION 1..158: note = Description of Unknown: uncultivated organism with predicted taxonomy: Clostridiales bacterium 42_27
  REGION 1..158: note = MG21-119 HNH domain

SEQ ID NO: 5265 - protein, 158 aa, unidentified; identical to SEQ ID NO: 5179
  REGION 1..158: note = Description of Unknown: uncultivated organism with predicted taxonomy: Ruminococcaceae bacterium TF06-43
  REGION 1..158: note = MG21-120 HNH domain

SEQ ID NO: 5266 - protein, 158 aa, unidentified; identical to SEQ ID NO: 5248
  REGION 1..158: note = Description of Unknown: uncultivated organism with predicted taxonomy: Clostridiales
  REGION 1..158: note = MG21-121 HNH domain

SEQ ID NO: 5267 - protein, 159 aa, unidentified; identical to SEQ ID NO: 5214
  REGION 1..159: note = Description of Unknown: uncultivated organism
  REGION 1..159: note = MG21-122 HNH domain

SEQ ID NO: 5268 - protein, 158 aa, unidentified; identical to SEQ ID NO: 5173
  REGION 1..158: note = Description of Unknown: uncultivated organism with predicted taxonomy: Clostridiales
  REGION 1..158: note = MG21-123 HNH domain

SEQ ID NO: 5269 - protein, 158 aa, unidentified; identical to SEQ ID NO: 5173
  REGION 1..158: note = Description of Unknown: uncultivated organism with predicted taxonomy: Clostridiales bacterium 42_27
  REGION 1..158: note = MG21-124 HNH domain

SEQ ID NO: 5270 - protein, 158 aa, unidentified; identical to SEQ ID NO: 5173
  REGION 1..158: note = Description of Unknown: uncultivated organism with predicted taxonomy: Clostridiales bacterium 42_27
  REGION 1..158: note = MG21-125 HNH domain

SEQ ID NO: 5271 - protein, 158 aa, unidentified; identical to SEQ ID NO: 5194
  REGION 1..158: note = Description of Unknown: uncultivated organism with predicted taxonomy: Clostridiales bacterium 42_27
  REGION 1..158: note = MG21-126 HNH domain

SEQ ID NO: 5272 - protein, 158 aa, unidentified
  REGION 1..158: note = Description of Unknown: uncultivated organism with predicted taxonomy: Clostridiales bacterium 42_27
  REGION 1..158: note = MG21-127 HNH domain
EMSRTFDERRKMEKRQDDNRAANERAKDQIAEYKGDHATGLDIVKFKLYREQDGVCLYSGQNLDIARLFEPGYADVDHIIPYSRCFDDSYQNKVLVLASENRQKGNRLPYEYFGQDEARWHGYEVRVENLIHNYRKRQKLLKRRLNEEESTGFIDRNL

SEQ ID NO: 5273 - protein, 158 aa, unidentified; identical to SEQ ID NO: 5194
  REGION 1..158: note = Description of Unknown: uncultivated organism with predicted taxonomy: Clostridiales bacterium 42_27
  REGION 1..158: note = MG21-128 HNH domain

SEQ ID NO: 5274 - protein, 158 aa, unidentified
  REGION 1..158: note = Description of Unknown: uncultivated organism with predicted taxonomy: Clostridiales bacterium 42_27
  REGION 1..158: note = MG21-129 HNH domain
EMSRTFDERRKMEKRQDDNRAANERAKDQIAEYKGDHATGLDIVKFKLYREQDGVCLYSGQNLDIARLFEPGYADVDHIIPYSRCFDDSYQNKVLVLASENRQKGNRLPYEYFGQDEARWHGYEVRVENLIHNYRKRQKLLKRRLTEEESSGFIARNL

SEQ ID NO: 5275 - protein, 158 aa, unidentified
  REGION 1..158: note = Description of Unknown: uncultivated organism with predicted taxonomy: Clostridiales bacterium 42_27
  REGION 1..158: note = MG21-130 HNH domain
EMSRTFDERRKMEKRQDDNRAANERAKDQIAEYKGAHATGLDIVKFKLYQEQDGVCLYSGQNLDIARLFEPGYADVDHIIPYSRCFDDSYQNKVLVLASENRQKGNRLPYEYFGQDEARWHGYEVRVENLIHNYRKRQKLLKRRLTEEESSGFIDRNL

SEQ ID NO: 5276 - protein, 158 aa, unidentified; identical to SEQ ID NO: 5194
  REGION 1..158: note = Description of Unknown: uncultivated organism with predicted taxonomy: Clostridiales bacterium 42_27
  REGION 1..158: note = MG21-131 HNH domain

SEQ ID NO: 5277 - protein, 158 aa, unidentified; identical to SEQ ID NO: 5173
  REGION 1..158: note = Description of Unknown: uncultivated organism with predicted taxonomy: Clostridiales bacterium 42_27
  REGION 1..158: note = MG21-132 HNH domain

SEQ ID NO: 5278 - protein, 158 aa, unidentified; identical to SEQ ID NO: 5203
  REGION 1..158: note = Description of Unknown: uncultivated organism with predicted taxonomy: Clostridiales
  REGION 1..158: note = MG21-133 HNH domain

SEQ ID NO: 5279 - protein, 158 aa, unidentified; identical to SEQ ID NO: 5194
  REGION 1..158: note = Description of Unknown: uncultivated organism with predicted taxonomy: Clostridiales bacterium 42_27
  REGION 1..158: note = MG21-134 HNH domain

SEQ ID NO: 5280 - protein, 158 aa, unidentified; identical to SEQ ID NO: 5173
  REGION 1..158: note = Description of Unknown: uncultivated organism with predicted taxonomy: Clostridiales
  REGION 1..158: note = MG21-135 HNH domain

SEQ ID NO: 5281 - protein, 159 aa, unidentified; identical to SEQ ID NO: 5153
  REGION 1..159: note = Description of Unknown: uncultivated organism with predicted taxonomy: Clostridiales
  REGION 1..159: note = MG21-136 HNH domain

SEQ ID NO: 5282 - protein, 157 aa, unidentified; identical to SEQ ID NO: 5246
  REGION 1..157: note = Description of Unknown: uncultivated organism with predicted taxonomy: Clostridiales
  REGION 1..157: note = MG21-137 HNH domain

SEQ ID NO: 5283 - protein, 158 aa, unidentified; identical to SEQ ID NO: 5173
  REGION 1..158: note = Description of Unknown: uncultivated organism with predicted taxonomy: Clostridiales bacterium 42_27
  REGION 1..158: note = MG21-138 HNH domain

SEQ ID NO: 5284 - protein, 158 aa, unidentified; identical to SEQ ID NO: 5173
  REGION 1..158: note = Description of Unknown: uncultivated organism with predicted taxonomy: Clostridiales
  REGION 1..158: note = MG21-139 HNH domain

SEQ ID NO: 5285 - protein, 158 aa, unidentified; identical to SEQ ID NO: 5194
  REGION 1..158: note = Description of Unknown: uncultivated organism with predicted taxonomy: Clostridiales bacterium 42_27
  REGION 1..158: note = MG21-140 HNH domain

SEQ ID NO: 5286 - protein, 159 aa, unidentified
  REGION 1..159: note = Description of Unknown: uncultivated organism with predicted taxonomy: Firmicutes
  REGION 1..159: note = MG21-141 HNH domain
EMSHSFDERNKMKKRQEDGRQENEQVKAQILETKAGDRVTGLDIVKFKLYREQDGVCLYSGKGLDLQRLYEPGYADVDHIIPYSRCFDDSYSNKVLVLASENRQKGNCTPYEYFGENEQRWHEFSVRVGASVRDFKKRQKLLNTSFGEEQGKNFIQRNL

SEQ ID NO: 5287 - protein, 158 aa, unidentified; identical to SEQ ID NO: 5173
  REGION 1..158: note = Description of Unknown: uncultivated organism with predicted taxonomy: Clostridiales bacterium 42_27
  REGION 1..158: note = MG21-142 HNH domain

SEQ ID NO: 5288 - protein, 158 aa, unidentified; identical to SEQ ID NO: 5197
  REGION 1..158: note = Description of Unknown: uncultivated organism with predicted taxonomy: Clostridiales bacterium 42_27
  REGION 1..158: note = MG21-143 HNH domain

SEQ ID NO: 5289 - protein, 158 aa, unidentified
  REGION 1..158: note = Description of Unknown: uncultivated organism with predicted taxonomy: Clostridiales
  REGION 1..158: note = MG21-144 HNH domain
EMGKPYDVRTQMTKKQEANAKRNEELRQQIKKIKGAEPTGQDIVKFKLFQDQNGVCLYSGQNLDITRLFEAGYVDVDHIIPYSISFDDSYTNKVLVRSPENRQKGNRIPADYFKSDPARWKRFETLVNTQVHNWKKKRNLLTQVLSEEQKNGFKQRNL

SEQ ID NO: 5290 - protein, 158 aa, unidentified
  REGION 1..158: note = Description of Unknown: uncultivated organism with predicted taxonomy: Clostridiales
  REGION 1..158: note = MG21-145 HNH domain
ELGKTFDERSKQEKRINENAARNEQAREQIREYKSGDSTGLDIVKFKLFQEQNGVCLYSGKNLDISRLFEAGYVDVDHIIPYSISFDDSYSNKVLVLAGENRQKGNRIPYQYFGNDRERWNRFETLVGTQIRSFKKRKNLLIRSLGEAQIEGFRQRNL

SEQ ID NO: 5291 - protein, 218 aa, unidentified
  REGION 1..218: note = Description of Unknown: uncultivated organism with predicted taxonomy: Bacteroidales
  REGION 1..218: note = MG22-1 HNH domain
DLKNTAEERSRIFRRNSENEDTIFRIKLLLEEFYANEKDIKDVRPYSPSQQELLRIYEEGVWQQEKDIPQDIKDIKKRISNDKDIKDITPNDIQRYRIWMDQKYCSPYTGKTIPLSRLFTTDYEIEHVIPRSRYFDDSYNNKVICEAAVNKDKNNRLGMEYIMAAGGKTIELGNGKNVQILKEEEYVELVDKIFGSNTRKRNIMLADEITEEFSHRQL

SEQ ID NO: 5292 - protein, 229 aa, unidentified
  REGION 1..229: note = Description of Unknown: uncultivated organism with predicted taxonomy: Bacteroidales
  REGION 1..229: note = MG22-3 HNH domain
DLKNTAEQRARIMRRNRENEMTNFRIKLLLQELHDCQPDIEGIRPYSPSQQELLRLYEETVWESESGKLGGKEASKDIPDDIKKIRDLLSKPSDKPIPQSAIQRYRLWLDQKYLSPYTGRPIPLARLFTADYEIEHIIPRSIFFDDSYANKVICESAVNKLKNNRLGMQFIREMDGRVETVKLGEGRETSILSVDGYVDLVNDLFRNNPRKRNNLLAEEITEDFCHRQL

SEQ ID NO: 5293 - protein, 229 aa, unidentified; identical to SEQ ID NO: 5292
  REGION 1..229: note = Description of Unknown: uncultivated organism with predicted taxonomy: Bacteroidales
  REGION 1..229: note = MG22-4 HNH domain

SEQ ID NO: 5294 - protein, 218 aa, unidentified
  REGION 1..218: note = Description of Unknown: uncultivated organism with predicted taxonomy: Bacteroidales
  REGION 1..218: note = MG22-5 HNH domain
DLKNTAEERSRIFRRNSENEDTNFRIKLLLEEFYANEKDIIDVRPYSPSQQELLRIYEEGVWQQEKDIPQDIKDIKKRISNDKDIKDITPNDIQRYRIWMDQKYCSPYTGKTIPLSRLFTTDYEIEHVIPRSRYFDDSYNNKVICEAAVNKDKNNRLGMEYIMAAGGKTIELGNGKNVQILKEEEYVELVDKIFGNNTRKRNIMLADEITEEFSHRQL

SEQ ID NO: 5295 - protein, 218 aa, unidentified
  REGION 1..218: note = Description of Unknown: uncultivated organism with predicted taxonomy: Bacteroidales
  REGION 1..218: note = MG22-6 HNH domain
DLKNTAEERSRIFRRNSENEDTNFRIKLLLEEFYANEKDIKDVRPYSPSQQELLRIYEEGVWLQEKDIPQDIKDIKKRISNDKDIKDITPNDIQRYRIWMDQKYCSPYTGKTIPLSRLFTTDYEIEHVIPRSRYFDDSYNNKVICEAAVNKDKNNRLGMEYIMAAGGKTIELGNGKNVQILKEEEYVELVDKIFGNNTRKRNIMLTDEITEDFSHRQL

SEQ ID NO: 5296 - protein, 218 aa, unidentified; identical to SEQ ID NO: 5294
  REGION 1..218: note = Description of Unknown: uncultivated organism with predicted taxonomy: Prevotella
  REGION 1..218: note = MG22-7 HNH domain

SEQ ID NO: 5297 - protein, 218 aa, unidentified; identical to SEQ ID NO: 5295
  REGION 1..218: note = Description of Unknown: uncultivated organism with predicted taxonomy: Bacteroidales
  REGION 1..218: note = MG22-8 HNH domain

SEQ ID NO: 5298 - protein, 218 aa, unidentified
  REGION 1..218: note = Description of Unknown: uncultivated organism with predicted taxonomy: Bacteroidales
  REGION 1..218: note = MG22-9 HNH domain
DLKNTAEERSRIFRRNSENEDTNFRIKLLLEEFYTNEEDMEGIRPYSPSQQELLRIYEEGVWQQEKEIPQDIKDIKKKLSSDKDINEITHSDVQRYRIWMDQKYCSPYTGNPIPLSRLFTPDYEIEHVIPRSRYFDDSYNNKVICEAAVNKDKNNRLGMEYIMEAGGKTIELGNGKNVQVLKEREYVELVNEVFKNNTRKRNILLADEIPEDFSHRQL

SEQ ID NO: 5299 - protein, 218 aa, unidentified
  REGION 1..218: note = Description of Unknown: uncultivated organism with predicted taxonomy: Bacteroidales
  REGION 1..218: note = MG22-10 HNH domain
DLKNTAEERSRIFRRNSENEDTNFRIKLLLEEFYANEKDIKDVRPYSPSQQELLRIYEEGVWQQEKDIPQDIKDIKKRISNDKDIKDITPNDIQRYRIWMDQKYCSPYTGKTIPLSRLFTTDYEIEHVIPRSRYFDDSYNNKVICEAAVNKDKNNRLGMEYIMAAGGKTIELGNGKNVQILKEEEYVELVDKIFGNNTRKRNIMLADEITEEFSHRQL

SEQ ID NO: 5300 - protein, 179 aa, unidentified
  REGION 1..179: note = Description of Unknown: uncultivated organism with predicted taxonomy: Prevotella
  REGION 1..179: note = MG22-11 HNH domain
DLKNSAAERAKISNRNKQNEGTNFRIKLLLQEFSQYEKDIEGIRPYSPSQQELLRIYEEGVCEQTEMPKDIAKIRRELSSSSEKDVKRSDIQRYRLWLDQKYCSPYTGQPIPLARLFTTDYEIEHVIPRSKYFDDSYNNKVICEAAVNKAKSNRLGMAFIQESGGQIIPLGNGRNVQVL

SEQ ID NO: 5301 - protein, 218 aa, unidentified; identical to SEQ ID NO: 5299
  REGION 1..218: note = Description of Unknown: uncultivated organism with predicted taxonomy: Prevotella sp. MGM2
  REGION 1..218: note = MG22-12 HNH domain

SEQ ID NO: 5302 - protein, 218 aa, unidentified
  REGION 1..218: note = Description of Unknown: uncultivated organism with predicted taxonomy: Prevotella
  REGION 1..218: note = MG22-13 HNH domain
DLENTAEERSRIFRRNSENEDTNFRIKLLLEEFYANEKDIKDVRPYSPSQQELLRIYEEGVWQQEKDIPQDIKDIKKRISNDKDIKDITPNDIQRYRIWMDQKYCSPYTGKTIPLSRLFTTDYEIEHVIPRSRYFDDSYNNKVICEAAVNKDKNNRLGMEYIMAAGGKTIELGNGKNVQILKKEEYVELVDKIFGNNTRKRNIMLADEITEDFSHRQL

SEQ ID NO: 5303 - protein, 23 aa, unidentified
  REGION 1..23: note = Description of Unknown: uncultivated organism with predicted taxonomy: Bacteroides ndongoniae
  REGION 1..23: note = MG22-14 HNH domain
DLKNTAEERSRIFRRNSENEDTN

SEQ ID NO: 5304 - protein, 218 aa, unidentified
  REGION 1..218: note = Description of Unknown: uncultivated organism with predicted taxonomy: Prevotella sp. MGM2
  REGION 1..218: note = MG22-15 HNH domain
DLKNTAEERSRIFRRNSENEDTNFRIKLLLEEFYANEKDIKDVRPYSPSQQELLRIYEEGVWQQEKDIPQDIKDIKKRISNDKDIKDITPNDIQRYRIWMDQKYCSPYTGKTIPLSRLFTTDYEIEHVIPRSRYFDDSYNNKVICEAAVNKDKNNRLGMEYIIAAGGKTIELGNGKNVQILKEEEYVELVDKIFGNNTRKRNIMLADEITEEFSHRQL

SEQ ID NO: 5305 - protein, 218 aa, unidentified
  REGION 1..218: note = Description of Unknown: uncultivated organism with predicted taxonomy: Prevotella sp. MGM2
  REGION 1..218: note = MG22-16 HNH domain
DLKNTAEERSKIFRRNSENEDTNFRIKLLLEEFYANEKDIKDVRPYSPSQQELLRIYEEGVWQQEKDIPQDIKDIKKRISNDKDIKDITPNDIQRYRIWMDQKYCSPYTGKTIPLSRLFTTDYEIEHVIPRSRYFDDSYNNKVICEAAVNKDKNNRLGMEYIIAAGGKTIELGNGKNVQILKEEEYVELVDKIFGNNTRKRNIMLADEITEEFSHRQL

SEQ ID NO: 5306 - protein, 218 aa, unidentified; identical to SEQ ID NO: 5304
  REGION 1..218: note = Description of Unknown: uncultivated organism with predicted taxonomy: Prevotella
  REGION 1..218: note = MG22-17 HNH domain

SEQ ID NO: 5307 - protein, 218 aa, unidentified; identical to SEQ ID NO: 5305
  REGION 1..218: note = Description of Unknown: uncultivated organism with predicted taxonomy: Bacteroidales
  REGION 1..218: note = MG22-18 HNH domain

SEQ ID NO: 5308 - protein, 218 aa, unidentified; identical to SEQ ID NO: 5299
  REGION 1..218: note = Description of Unknown: uncultivated organism with predicted taxonomy: Prevotella
  REGION 1..218: note = MG22-19 HNH domain

SEQ ID NO: 5309 - protein, 163 aa, unidentified
  REGION 1..163: note = Description of Unknown: uncultivated organism with predicted taxonomy: Prevotella sp. MGM2
  REGION 1..163: note = MG22-20 HNH domain
DLKNTAEERSRIFRRNSENEDTNFRIKLLLEEFYANEKDIKDVRPYSPSQQELLRIYEEGVWQQEKDIPQDIKDIKKRISNDKDIKDITPNDIQRYRIWMDQKYCSPYTGKTIPLSRLFTTDYEIEHVIPRSRYFDDSYNNKVICEAAVNKDKNNRLGMEYIM

SEQ ID NO: 5310 - protein, 218 aa, unidentified; identical to SEQ ID NO: 5299
  REGION 1..218: note = Description of Unknown: uncultivated organism with predicted taxonomy: Bacteroidales
  REGION 1..218: note = MG22-21 HNH domain

SEQ ID NO: 5311 - protein, 218 aa, unidentified; identical to SEQ ID NO: 5302
  REGION 1..218: note = Description of Unknown: uncultivated organism with predicted taxonomy: Bacteroidales
  REGION 1..218: note = MG22-22 HNH domain

SEQ ID NO: 5312 - protein, 217 aa, unidentified
  REGION 1..217: note = Description of Unknown: uncultivated organism with predicted taxonomy: Bacteroidales
  REGION 1..217: note = MG22-23 HNH domain
DLKNSAAERAKISNRNKQNEGTNFRIKLLLQEFSQYEKDIEGIRPYSPSQQELLRIYEKGVCEQTEMPKDIAKIRRELSSSSSEKDVKRSDIQRYRLWLDQKYCSPYTGQPIPLARLFTTDYEIEHVIPRSKYFDDSYNNKVICEAAVNKAKSNRLGMAFIQESGGQIIPLGNGRNVQVLNESAYVEFINKTFKHNARKRSLMLADEITEEFCHRQL

SEQ ID NO: 5313 - protein, 218 aa, unidentified
  REGION 1..218: note = Description of Unknown: uncultivated organism with predicted taxonomy: Bacteroidales
  REGION 1..218: note = MG22-24 HNH domain
DLKNTAEERSRIFRRNSENEDTNFRIKLLLEEFNANEKDIKDVRPYSPSQQELLRIYEEGVWQQEKDIPQDIKDIKKRISNDKDIKDITPNDIQRYRIWMDQKYCSPYTGKTIPLSRLFTTDYEIEHVIPRSRYFDDSYNNKVICEAAVNKDKNNRLGMEYIMAAGGKTIELGNGKNVQILKEEEYVELVDKIFGNNTRKRNIMLANEITEEFSHRQL

SEQ ID NO: 5314 - protein, 218 aa, unidentified; identical to SEQ ID NO: 5299
  REGION 1..218: note = Description of Unknown: uncultivated organism with predicted taxonomy: Prevotella sp. MGM2
  REGION 1..218: note = MG22-25 HNH domain

SEQ ID NO: 5315 - protein, 218 aa, unidentified
  REGION 1..218: note = Description of Unknown: uncultivated organism with predicted taxonomy: Bacteroidales
  REGION 1..218: note = MG22-26 HNH domain
DLKNTAEERSRIFRRNNENEDTNFRIKLLLEEFYANEKDIKDVRPYSPSQQELLRIYEEGVWQQEKDIPQDIKDIKKRISNDKDIKDITPNDIQRYRIWMDQKYCSPYTGKTIPLSRLFTTDYEIEHVIPRSRYFDDSYNNKVICEAAVNKDKNNRLGMEYIMAAGGKTIELGNGKNVQILKEEEYVELVDKIFGNNTRKRNIMLADEITEEFSHRQL

SEQ ID NO: 5316 - protein, 218 aa, unidentified; identical to SEQ ID NO: 5299
  REGION 1..218: note = Description of Unknown: uncultivated organism with predicted taxonomy: Prevotella sp. MGM2
  REGION 1..218: note = MG22-27 HNH domain

SEQ ID NO: 5317 - protein, 218 aa, unidentified; identical to SEQ ID NO: 5304
  REGION 1..218: note = Description of Unknown: uncultivated organism with predicted taxonomy: Bacteroidales
  REGION 1..218: note = MG22-28 HNH domain

SEQ ID NO: 5318 - protein, 218 aa, unidentified; identical to SEQ ID NO: 5299
  REGION 1..218: note = Description of Unknown: uncultivated organism with predicted taxonomy: Bacteroidales
  REGION 1..218: note = MG22-29 HNH domain

SEQ ID NO: 5319 - protein, 206 aa, unidentified
  REGION 1..206: note = Description of Unknown: uncultivated organism with predicted taxonomy: Prevotella sp. MGM2
  REGION 1..206: note = MG22-30 HNH domain
FRRNSENEDTNFRIKLLLEEFYANEKDIKDVRPYSPSQQELLRIYEEGVWQQEKDIPQDIKDIKKRISNDKDIKDITPNDIQRYRIWMDQKYCSPYTGKTIPLSRLFTTDYEIEHVIPRSRYFDDSYNNKVICEAAVNKDKNNRLGMEYIMAAGGKTIELGNGKNVQILKEEEYVELVDKIFGNNTRKRNIMLTDEITEEFSHRQL

SEQ ID NO: 5320 - protein, 218 aa, unidentified; identical to SEQ ID NO: 5299
  REGION 1..218: note = Description of Unknown: uncultivated organism with predicted taxonomy: Bacteroidales
  REGION 1..218: note = MG22-31 HNH domain

SEQ ID NO: 5321 - protein, 47 aa, unidentified
  REGION 1..47: note = Description of Unknown: uncultivated organism with predicted taxonomy: Bacteroidales
  REGION 1..47: note = MG22-32 HNH domain
DLKNSAAERAKISNRNKQNEGTNFRIKLLLQEFSQYEKDIEGIRRAL

SEQ ID NO: 5322 - protein, 218 aa, unidentified; identical to SEQ ID NO: 5299
  REGION 1..218: note = Description of Unknown: uncultivated organism with predicted taxonomy: Bacteroidales
  REGION 1..218: note = MG22-33 HNH domain

SEQ ID NO: 5323 - protein, 216 aa, unidentified
  REGION 1..216: note = Description of Unknown: uncultivated organism with predicted taxonomy: Bacteroidales
  REGION 1..216: note = MG22-34 HNH domain
DLKNSAAERAKISNRNKQNEGTNFRIKLLLQEFSQYEKDIEGIRPYSPSQQELLRIYEEGVCEQTEMPKDIAKIRRELSSSSEKDVKRSDIQRYRLWLDQKYCSPYTGQPIPLARLFTTDYEIEHVIPRSKYFDDSYNNKVICEAAVNKAKSNRLGMAFIQESGGQIIPLGNGRNVQVLNESAYVEFINKTFKHNARKRSLMLADEITEEFCHRQL

SEQ ID NO: 5324 - protein, 216 aa, unidentified; identical to SEQ ID NO: 5323
  REGION 1..216: note = Description of Unknown: uncultivated organism with predicted taxonomy: Parabacteroides sp. An277
  REGION 1..216: note = MG22-35 HNH domain

SEQ ID NO: 5325 - protein, 217 aa, unidentified
  REGION 1..217: note = Description of Unknown: uncultivated organism with predicted taxonomy: Bacteroidales
  REGION 1..217: note = MG22-36 HNH domain
DLKNSAAERAKISNRNKQNEGTNFRIKLLLQEFSQYEKDIEGIRPYSPSQQELLRIYEKGVCEQTEMPKDIAKIRRELSSSSSEKDVKRSDIQRYRLWLDQKYCSPYTGQPIPLARLFTTDYEIEHVIPRSKYFDDSYNNKVICEAAVNKAKSNRLGMTFIQESGGQIIPLGNGRNVQVLNESAYVEFINKTFKHNARKRSLMLADEITEEFCHRQL

SEQ ID NO: 5326 - protein, 218 aa, unidentified
  REGION 1..218: note = Description of Unknown: uncultivated organism with predicted taxonomy: Bacteroidales
  REGION 1..218: note = MG22-37 HNH domain
DLKNTAEERSRIFRRNSENEDTNFRIKLLLEEFYANEKDIKDVRPYSPSQQELLRIYEEGVWQQEKDIPQDIKDIKKRISNDKDIKDITPNDIQRYRIWMDQKYCSPYTGKTIPLSRLFTTDYEIEHVIPRSRYFDDTYNNKVICESAVNKDKNNRLGMEYIMAAGGKTIELGNGKNVQILKEEEYVELVDKIFGNNTRKRNIMLADEITEDFSHRQL

SEQ ID NO: 5327 - protein, 218 aa, unidentified; identical to SEQ ID NO: 5299
  REGION 1..218: note = Description of Unknown: uncultivated organism with predicted taxonomy: Prevotella
  REGION 1..218: note = MG22-38 HNH domain

SEQ ID NO: 5328 - protein, 218 aa, unidentified
  REGION 1..218: note = Description of Unknown: uncultivated organism with predicted taxonomy: Prevotella sp. MGM2
  REGION 1..218: note = MG22-39 HNH domain
DLKNTAEERSRIFKRNSENEDTNFRIKLLLEEFYANEKDIKDVRPYSPSQQELLRIYEEGVWQQEKDIPQDIKDIKKRISNDKDIKDITPNDIQRYRIWMDQKYCSPYTGKTIPLSRLFTTDYEIEHVIPRSRYFDDSYNNKVICEAAVNKDKNNRLGMEYIMAAGGKTIELGNGKNVQILKEEEYVELVDKIFGNNTRKRNIMLADEITEEFSHRQL

SEQ ID NO: 5329 - protein, 216 aa, unidentified
  REGION 1..216: note = Description of Unknown: uncultivated organism with predicted taxonomy: Bacteroidales
  REGION 1..216: note = MG22-40 HNH domain
DLKNSAAERAKISNRNKQNEGTNFRIKLLLQEFSQYEKDIEGIRPYSPSQQELLRIYEEGVCEQTEMPKDIAKIRRELSSSSEKDVKRSDIQRYRLWLDQKYCSPYTGQPIPLARLFTTDYEIEHVIPRSKYFDDSYNNKVICEAAVNKAKSNRLGMAFIQESGGQIIPLGNGRNVQVLSESAYVEFINKTFKHNARKRSLMLADEITEEFCHRQL

SEQ ID NO: 5330 - protein, 218 aa, unidentified
  REGION 1..218: note = Description of Unknown: uncultivated organism with predicted taxonomy: Bacteroidales
  REGION 1..218: note = MG22-41 HNH domain
DLKNTAEERSRIFRRNSENEDTNFRIKLLLEEFYANEKDIKDVRPYSPSQQELLRIYEEGVWQQEKDIPQDIKDIKKRISNDKDIKDITPNDIQRYRIWMDQKYCSPYTGKTIPLSRLFTTDYEIEHVIPRSRYFDDSYNNKVICEAAVNKDKNNRLGMEYIMAAGGKTIELGNGKNVQILKEEEYVELVDKIFGNNTRKRNIMLADEITEDFSHRQL

SEQ ID NO: 5331 - protein, 218 aa, unidentified; identical to SEQ ID NO: 5313
  REGION 1..218: note = Description of Unknown: uncultivated organism with predicted taxonomy: Prevotella
  REGION 1..218: note = MG22-42 HNH domain

SEQ ID NO: 5332 - protein, 218 aa, unidentified
  REGION 1..218: note = Description of Unknown: uncultivated organism with predicted taxonomy: Bacteroidales
  REGION 1..218: note = MG22-43 HNH domain
DLKNTAEERSRIFRRNSENEDTNFRIKLLLEEFNANEKDIKDVRPYSPSQQELLRIYEEGVWQQEKDIPQDIKDIKKRISNDKDIKDITPNDIQRYRIWMDQKYCSPYTGKTIPLSRLFTTDYEIEHVIPRSRYFDDSYNNKVICEAAVNKDKNNRLGMEYIMAAGGKTIELGNGKDVQILKEEEYVELVDKIFGNNTRKRNIMLADEITEEFSHRQL

SEQ ID NO: 5333 - protein, 218 aa, unidentified; identical to SEQ ID NO: 5299
  REGION 1..218: note = Description of Unknown: uncultivated organism with predicted taxonomy: Bacteroidales
  REGION 1..218: note = MG22-44 HNH domain

SEQ ID NO: 5334 - protein, 218 aa, unidentified
  REGION 1..218: note = Description of Unknown: uncultivated organism with predicted taxonomy: Bacteroidales
  REGION 1..218: note = MG22-45 HNH domain
DLKNTAEERSRIFRRNSENEDTNFRIKLLLEEFNANEKDIKDVRPYSPSQQELLHIYEEGVWQQEKDIPQDIKDIKKRISNDKDIKGITPNDIQRYRIWMDQKYCSPYTGKTIPLSRLFTTDYEIEHVIPRSRYFDDSYNNKVICEAAVNKDKNNRLGMEYIMAAGGKTIKLGNGKNVQILKEEEYVELVDKIFGNNTRKRNIMLADEITEEFSHRQL

SEQ ID NO: 5335 - protein, 216 aa, unidentified; identical to SEQ ID NO: 5323
  REGION 1..216: note = Description of Unknown: uncultivated organism with predicted taxonomy: Bacteroidales
  REGION 1..216: note = MG22-46 HNH domain

SEQ ID NO: 5336 - protein, 218 aa, unidentified
  REGION 1..218: note = Description of Unknown: uncultivated organism with predicted taxonomy: Bacteroidales
  REGION 1..218: note = MG22-47 HNH domain
DLKNTAEERSRIFRRNSENEDTNFRIKLLLEEFYANEKDIKDVRPYSPSQQELLRIYEEGVWQQEKDIPQDIKDIKKRISNDKDIKDITPNDIQRYRIWMDQKYCSPYTGKTIPLSRLFTTDYEIEHVIPRSRYFDDSYNNKVICEATVNKDKNNRLGMEYIMAAGGKTIELGNGKNVQILKEEEYVELVDKIFGNNTRKRNIMLADEITEEFSHRQL

SEQ ID NO: 5337 - protein, 216 aa, unidentified; identical to SEQ ID NO: 5323
  REGION 1..216: note = Description of Unknown: uncultivated organism with predicted taxonomy: Bacteroidales
  REGION 1..216: note = MG22-48 HNH domain

SEQ ID NO: 5338 - protein, 218 aa, unidentified; identical to SEQ ID NO: 5299
  REGION 1..218: note = Description of Unknown: uncultivated organism with predicted taxonomy: Bacteroidales
  REGION 1..218: note = MG22-49 HNH domain

SEQ ID NO: 5339 - protein, 218 aa, unidentified
  REGION 1..218: note = Description of Unknown: uncultivated organism with predicted taxonomy: Bacteroidales
  REGION 1..218: note = MG22-50 HNH domain
DLKNTAEERSRIFRRNSENEDTNFRIKLLLEEFYANEKDIKDVRPYSPSQQELLRIYEEGVWQKEKDIPQDIKDIKKRISNDKDIKDITPNDIQRYRIWMDQKYCSPYTGKTIPLSRLFTTDYEIEHVIPRSRYFDDSYNNKVICEAAVNKDKNNRLGMEYIMAAGGKTIELGNGKNVQILKEEEYVELVDKIFGNNTRKRNIMLADEITEEFSHRQL

SEQ ID NO: 5340 - protein, 217 aa, unidentified
  REGION 1..217: note = Description of Unknown: uncultivated organism with predicted taxonomy: Prevotellaceae
  REGION 1..217: note = MG22-51 HNH domain
DLKNSAAERAKISNRNKQNEGTNFRIKLLLQEFSQYEKDIEGIRPYSPSQQELLRIYEEGVCEQTEMPKDIAKIRRELSSSSSEKDVKRSDIQRYRLWLDQKYCSPYTGQPIPLARLFTTDYEIEHVIPRSKYFDDSYNNKVICEAAVNKAKSNRLGMAFIQESGGQIIPLGNGRNVQVLNESAYVEFINKTFKHNARKRSLMLADEITEEFCNRQL

SEQ ID NO: 5341 - protein, 168 aa, unidentified
  REGION 1..168: note = Description of Unknown: uncultivated organism with predicted taxonomy: Prevotella sp. MGM2
  REGION 1..168: note = MG22-52 HNH domain
DLKNTAEERSRIFRRNSENEDTNFRIKLLLEEFYANEKDIKDVRPYSPSQQELLRIYEEGVWQQEKDIPQDIKDIKKRISNDKDIKDITPNDIQRYRIWMDQKYCSPYTGKTIPLSRLFTTDYEIEHVIPRSRYFDDSYNNKVICEAAVNKDKNNRLYNPQNEAFRLS

SEQ ID NO: 5342 - protein, 218 aa, unidentified
  REGION 1..218: note = Description of Unknown: uncultivated organism with predicted taxonomy: Bacteroidales
  REGION 1..218: note = MG22-53 HNH domain
DLKNTAEERSRIFRRNSENEDTNFRIKLLLEEFYANEKDIKDVRPYSPSQQELLRIYEEGVWQQEKDIPQDIKDIKKRISNDKDIKDITPNDIQRYRIWMDQKYCSPYTGKTIPLSRLFTTDYEIEHVIPRSRYFDDSYNNKVICEATVNKDKNNRLGMEYIMAAGGKTIELGNGKNVQILKEEEYVELVDKIFGNNTRKRNIMLTDEITEEFSHRQL

SEQ ID NO: 5343 - protein, 218 aa, unidentified
  REGION 1..218: note = Description of Unknown: uncultivated organism with predicted taxonomy: Bacteroidales
  REGION 1..218: note = MG22-54 HNH domain
DLKNTAEERSRIFRRNSENEDTNFRIKLLLEEFNANEKDIKDVRPYSPSQQELLRIYEEGVWQQEKDIPQDIKDIKKRISNDKDIKGITPNDIQRYRIWMDQKYCSPYTGKTIPLSRLFTTDYEIEHVIPRSRYFDDSYNNKVICEAAVNKDKNNRLGMEYIMAAGGKTIKLGNGKNVQILKEEEYVELVDKIFGNNTRKRNIMLADEITEEFSHRQL

SEQ ID NO: 5344 - protein, 218 aa, unidentified; identical to SEQ ID NO: 5343
  REGION 1..218: note = Description of Unknown: uncultivated organism with predicted taxonomy: Bacteroidales
  REGION 1..218: note = MG22-55 HNH domain

SEQ ID NO: 5345 - protein, 218 aa, unidentified
  REGION 1..218: note = Description of Unknown: uncultivated organism with predicted taxonomy: Bacteroidales
  REGION 1..218: note = MG22-56 HNH domain
DLKNTAEERSRIFKRNSENEDTNFRIKLLLEEFYANEKDIKDVRPYSPSQQELLRIYEEGVWQQEKDIPQDIKDIKKRISNDKDIKDITPNDIQRYRIWMDQKYCSPYTGKTIPLSRLFTTDYEIEHVIPRSRYFDDSYNNKVICEAAVNKDKNNRLGMEYIMAAGGKTIELGNGKNVQILKKEEYVELVDKIFGNNTRKRNIMLADEITEDFSHRQL

SEQ ID NO: 5346 - protein, 218 aa, unidentified
  REGION 1..218: note = Description of Unknown: uncultivated organism with predicted taxonomy: Bacteroidales
  REGION 1..218: note = MG22-57 HNH domain
DLKNTAEERSRIFRRNSENEDTNFRIKLLLEEFNANEKDIKDVRPYSPSRQELLRIYEEGVWQQEKDIPQDIKDIKKRISNDKDIKDITPNDIQRYRIWMDQKYCSPYTGKTIPLSRLFTTDYEIEHVIPRSRYFDDSYNNKVICEAAVNKDKNNRLGMEYIMAAGGKTIELGNGKNVQILKEEEYVELVDKIFGNNTRKRNIMLADEITEEFSHRQL

SEQ ID NO: 5347 - protein, 218 aa, unidentified; identical to SEQ ID NO: 5299
  REGION 1..218: note = Description of Unknown: uncultivated organism with predicted taxonomy: Bacteroidales
  REGION 1..218: note = MG22-58 HNH domain

SEQ ID NO: 5348 - protein, 218 aa, unidentified; identical to SEQ ID NO: 5302
  REGION 1..218: note = Description of Unknown: uncultivated organism with predicted taxonomy: Bacteroidales
  REGION 1..218: note = MG22-59 HNH domain

SEQ ID NO: 5349 - protein, 218 aa, unidentified; identical to SEQ ID NO: 5299
  REGION 1..218: note = Description of Unknown: uncultivated organism with predicted taxonomy: Bacteroidales
  REGION 1..218: note = MG22-60 HNH domain

SEQ ID NO: 5350 - protein, 218 aa, unidentified
  REGION 1..218: note = Description of Unknown: uncultivated organism with predicted taxonomy: Bacteroidales
  REGION 1..218: note = MG22-61 HNH domain
DLKNTAEERSRIFRRNSENEDTNFRIKLLLEEFNANEKDIKDVRPYSPSQQELLRIYEEGVWQQEKDIPQDIKDIKKRISNDKDIKDITPNDIQRYRIWMDQKYCSPYTGKTIPLSRLFTTDYEIEHVIPRSRYFDDSYNNKVICEAAVNKDKNNRLGMEYIMAAGGKTIELGNGKNVQILMEEEYVELVDKIFGNNTRKRNIMLADEITEEFSHRQL

SEQ ID NO: 5351 - protein, 218 aa, unidentified; identical to SEQ ID NO: 5299
  REGION 1..218: note = Description of Unknown: uncultivated organism with predicted taxonomy: Bacteroidales
  REGION 1..218: note = MG22-62 HNH domain

SEQ ID NO: 5352 - protein, 155 aa, unidentified
  REGION 1..155: note = Description of Unknown: uncultivated organism with predicted taxonomy: Parabacteroides
  REGION 1..155: note = MG22-63 HNH domain
DLKNTAEERSRIFRRNSENEDTNFRIKLLLEEFYANEKDIKDVRPYSPSQQELLRIYEEGVWQQEKDIPQDIKDIKKRISNDKDIKDITPNDIQRYRIWMDQKYCSPYTGKTIPLSRLFTTDYEIEHVIPRSRYFDDSYNNKVICEAAVNKDKNN

SEQ ID NO: 5353 - protein, 218 aa, unidentified
  REGION 1..218: note = Description of Unknown: uncultivated organism with predicted taxonomy: Prevotella sp. MGM2
  REGION 1..218: note = MG22-64 HNH domain
DLKNTAEERSRIFRRNSENEDTNFRIKLLLEEFNANEKDIKDVRPYSPSQQELLRIYEEGVWQQEKDIPQDIKDIKKRISNDKDIKDITPNDIQRYRIWMDQKYCSPYTGKTIPLSRLFTTDYEIEHVIPRSRYFDDSYNNKVICEAAVNKDKNNRLGMEYIMAAGGKTIELGNGKNVQILKEEEYVELVDKIFGNNTRKRNIMLADEITEEFSHRQL

SEQ ID NO: 5354 - protein, 218 aa, unidentified; identical to SEQ ID NO: 5353
  REGION 1..218: note = Description of Unknown: uncultivated organism with predicted taxonomy: Prevotella
  REGION 1..218: note = MG22-65 HNH domain

SEQ ID NO: 5355 - protein, 218 aa, unidentified; identical to SEQ ID NO: 5299
  REGION 1..218: note = Description of Unknown: uncultivated organism with predicted taxonomy: Prevotella sp. MGM2
  REGION 1..218: note = MG22-66 HNH domain

SEQ ID NO: 5356 - protein, 180 aa, unidentified
  REGION 1..180: note = Description of Unknown: uncultivated organism with predicted taxonomy: Bacteroidales
  REGION 1..180: note = MG22-67 HNH domain
DLKNTAEERSRIFRRNSENEDTNFRIKLLLEEFNANEKDIKDVRPYSPSQQELLRIYEEGVWQQEKDIPQDIKDIKKRISNDKDIKDITPNDIQRYRIWMDQKYCSPYTAKRYHCPVFSPPTTKSNTSFRVHGILTTPIIIRSSAKLPSTKTKTTDWAWNTSWLLEEKRLNSATGKTFKF

SEQ ID NO: 5357 - protein, 218 aa, unidentified; identical to SEQ ID NO: 5299
  REGION 1..218: note = Description of Unknown: uncultivated organism with predicted taxonomy: Bacteroidales
  REGION 1..218: note = MG22-68 HNH domain

SEQ ID NO: 5358 - protein, 218 aa, unidentified; identical to SEQ ID NO: 5353
  REGION 1..218: note = Description of Unknown: uncultivated organism with predicted taxonomy: Bacteroidales
  REGION 1..218: note = MG22-69 HNH domain

SEQ ID NO: 5359 - protein, 218 aa, unidentified; identical to SEQ ID NO: 5299
  REGION 1..218: note = Description of Unknown: uncultivated organism with predicted taxonomy: Bacteroidales
  REGION 1..218: note = MG22-70 HNH domain

SEQ ID NO: 5360 - protein, 217 aa, unidentified; identical to SEQ ID NO: 5340
  REGION 1..217: note = Description of Unknown: uncultivated organism with predicted taxonomy: Bacteroidales
  REGION 1..217: note = MG22-71 HNH domain

SEQ ID NO: 5361 - protein, 218 aa, unidentified
  REGION 1..218: note = Description of Unknown: uncultivated organism with predicted taxonomy: Bacteroidales
  REGION 1..218: note = MG22-72 HNH domain
DLKNTAEERSRIFRRNSENEDTNFRIKLLLEKFNANEKDIKDVRPYSPSQQELLRIYEEGVWQQEKDIPQDIKDIKKRISNDKDIKDITPNDIQRYRIWMDQKYCSPYTGKTIPLSRLFTTDYEIEHVIPRSRYFDDSYNNKVICEAAVNKDKNNRLGMEYIMAAGGKTIELGNGKNVQILKEEEYVELVDKIFGNNTRKRNIMLADEITEEFSHRQL

SEQ ID NO: 5362 - protein, 218 aa, unidentified; identical to SEQ ID NO: 5305
  REGION 1..218: note = Description of Unknown: uncultivated organism with predicted taxonomy: Prevotella sp. MGM2
  REGION 1..218: note = MG22-73 HNH domain

SEQ ID NO: 5363 - protein, 218 aa, unidentified; identical to SEQ ID NO: 5305
  REGION 1..218: note = Description of Unknown: uncultivated organism with predicted taxonomy: Bacteroidales
  REGION 1..218: note = MG22-74 HNH domain

SEQ ID NO: 5364 - protein, 218 aa, unidentified
  REGION 1..218: note = Description of Unknown: uncultivated organism with predicted taxonomy: Bacteroidales
  REGION 1..218: note = MG22-75 HNH domain
DLKNTAEERARISKRNSENEDTNFRIKLLLKEFYTNEEDMEGIRPYSPSQQELLRIYEEGVWQQEKEIPQDIKDIKKKLSSDKDINEITHSDVQRYRIWMDQEYCSPYTGNPIPLSRLFTPDYEIEHVIPRSRYFDDSYNNKVICEAAVNKDKNNRLGMEYIMEAGGKTIELGNGKNVQVLKEREYVELVNEVFKNNTRKRNILLADEIPEDFSHRQL

SEQ ID NO: 5365 - protein, 218 aa, unidentified
  REGION 1..218: note = Description of Unknown: uncultivated organism with predicted taxonomy: Bacteroidales
  REGION 1..218: note = MG22-76 HNH domain
DLKNTAEERSRIFRRNSENEDTNFRIKLLLEEFYANEKDIKDVRPYSPSQQELLRIYEEGVWQQEKDIPQDIKDIKKRISNDKDIKDITPNDIQRYRIWMDQKYCSPYTGKTIPLSRLFTTDYEIEHVIPRSRYFDDSYNNKVICEAAVNKDKNNRLGMEYIMAAGGKTIELGNGKNVQILKEEEYVELVDKIFGSNTRKRNIMLADEITEDFSHRQL

SEQ ID NO: 5366 - protein, 218 aa, unidentified; identical to SEQ ID NO: 5299
  REGION 1..218: note = Description of Unknown: uncultivated organism with predicted taxonomy: Prevotella
  REGION 1..218: note = MG22-77 HNH domain

SEQ ID NO: 5367 - protein, 218 aa, unidentified; identical to SEQ ID NO: 5302
  REGION 1..218: note = Description of Unknown: uncultivated organism with predicted taxonomy: Bacteroidales
  REGION 1..218: note = MG22-78 HNH domain

SEQ ID NO: 5368 - protein, 218 aa, unidentified
  REGION 1..218: note = Description of Unknown: uncultivated organism with predicted taxonomy: Bacteroidales
  REGION 1..218: note = MG22-79 HNH domain
DLKNTAEERSRIFRRNSENEDTNFRIKLLLEEFYANEKDIKDVRPYSPSQQELLRIYEEGVWQQEKDIPQDIKDIRKRISNDKDIKDITPNDIQRYRIWMDQKYCSPYTGKTIPLSRLFTTDYEIEHVIPRSRYFDDSYNNKVICEAAVNKDKNNRLGMEYIIAAGGKTIELGNGKNVQILKEEEYVELVDKIFGNNTRKRNIMLADEITEEFSHRQL

SEQ ID NO: 5369 - protein, 218 aa, unidentified; identical to SEQ ID NO: 5299
  REGION 1..218: note = Description of Unknown: uncultivated organism with predicted taxonomy: Bacteroidales
  REGION 1..218: note = MG22-80 HNH domain

SEQ ID NO: 5370 - protein, 217 aa, unidentified; identical to SEQ ID NO: 5340
  REGION 1..217: note = Description of Unknown: uncultivated organism with predicted taxonomy: Bacteroidales
  REGION 1..217: note = MG22-81 HNH domain

SEQ ID NO: 5371 - protein, 218 aa, unidentified; identical to SEQ ID NO: 5353
  REGION 1..218: note = Description of Unknown: uncultivated organism with predicted taxonomy: Prevotella
  REGION 1..218: note = MG22-82 HNH domain

SEQ ID NO: 5372 - protein, 218 aa, unidentified; identical to SEQ ID NO: 5353
  REGION 1..218: note = Description of Unknown: uncultivated organism with predicted taxonomy: Prevotella
  REGION 1..218: note = MG22-83 HNH domain

SEQ ID NO: 5373 - protein, 218 aa, unidentified; identical to SEQ ID NO: 5330
  REGION 1..218: note = Description of Unknown: uncultivated organism with predicted taxonomy: Bacteroidales
  REGION 1..218: note = MG22-84 HNH domain

SEQ ID NO: 5374 - protein, 218 aa, unidentified; identical to SEQ ID NO: 5299
  REGION 1..218: note = Description of Unknown: uncultivated organism with predicted taxonomy: Prevotella
  REGION 1..218: note = MG22-85 HNH domain

SEQ ID NO: 5375 - protein, 218 aa, unidentified
  REGION 1..218: note = Description of Unknown: uncultivated organism with predicted taxonomy: Bacteroidales
  REGION 1..218: note = MG22-86 HNH domain
DLKNTAEERSRIFRRNSENEETNFRIKLLLEEFYANEKDIKDVRPYSPSQQELLRIYEEGVWQQEKDIPQDIKDIKKRISNDKDIKDITPNDIQRYRIWMDQKYCSPYTGKTIPLSRLFTTDYEIEHVIPRSRYFDDSYNNKVICEAAINKDKNNRLGMEYIMAAGGKTIELGNGKDVQILKEEEYVELVDKIFGNNTRKRNIMLADEITEEFSHRQL

SEQ ID NO: 5376 - protein, 218 aa, unidentified
  REGION 1..218: note = Description of Unknown: uncultivated organism with predicted taxonomy: Prevotella sp. MGM2
  REGION 1..218: note = MG22-87 HNH domain
DLKNTAEERSRIFRRNSENEDTNFRIKLLLEEFYANEKDIKDVRPYSPSQQELLRIYEEGVWQQEKDIPQDIKDIKKRISNDKDIKDITPNDIQRYRIWMDQKYCSPYTGKTIPLSRLFTTDYEIEHVIPRSRYFDDSYNNKVICEAAVNKDKNNRLGMEYIMAAGGKTIELGNGKNVQILKEEEYVELVDKIFGNNTRKRNIMLADEITEEFSQRQL

SEQ ID NO: 5377 - protein, 218 aa, unidentified
  REGION 1..218: note = Description of Unknown: uncultivated organism with predicted taxonomy: Prevotella sp. MGM2
  REGION 1..218: note = MG22-88 HNH domain
DLKNTAEERSRIFRRNSENEDTNFRIKLLLEEFYANEKDIKDVRPYSPSQQELLRIYEEGVWQQEKDIPQDIKDIKKRISNDKDIKDITPNDIQRYRIWMDQKYCSPYTGKTIPLSRLFTTDYEIEHVIPRSRYFDDSYNNKVICEAAVNKDKNNRLGMEYIMAAGGKTIELGNGKNVQILKEEEYVELVDKIFGNNTRKRNIMLTDEITEEFSHRQL

SEQ ID NO: 5378 - protein, 218 aa, unidentified
  REGION 1..218: note = Description of Unknown: uncultivated organism with predicted taxonomy: Prevotella sp. MGM2
  REGION 1..218: note = MG22-89 HNH domain
DLKNTAEERSRIFRRNSENEDTIFRIKLLLEEFYANEKDIKDVRPYSPSQQELLRIYEEGVWQQEKDIPQDIKDIKKRISNDKDIKDITPNDIQRYRIWMDQKYCSPYTGKTIPLSRLFTTDYEIEHVIPRSRYFDDSYNNKVICEAAVNKDKNNRLGMEYIMAAGGKTIELGNGKNVQILKEEEYVELVDKIFGNNTRKRNIMLADEITEEFSHRQL

SEQ ID NO: 5379 - protein, 218 aa, unidentified; identical to SEQ ID NO: 5304
  REGION 1..218: note = Description of Unknown: uncultivated organism with predicted taxonomy: Bacteroidales
  REGION 1..218: note = MG22-90 HNH domain

SEQ ID NO: 5380 - protein, 218 aa, unidentified; identical to SEQ ID NO: 5377
  REGION 1..218: note = Description of Unknown: uncultivated organism with predicted taxonomy: Prevotella
  REGION 1..218: note = MG22-91 HNH domain

SEQ ID NO: 5381 - protein, 218 aa, unidentified; identical to SEQ ID NO: 5302
  REGION 1..218: note = Description of Unknown: uncultivated organism with predicted taxonomy: Bacteroidales
  REGION 1..218: note = MG22-92 HNH domain

SEQ ID NO: 5382 - protein, 217 aa, unidentified
  REGION 1..217: note = Description of Unknown: uncultivated organism with predicted taxonomy: Prevotella
  REGION 1..217: note = MG22-94 HNH domain
NMRATAKERQKTSQLQLENEQANLRIKALLQEFMNPEFEVEDVRPYSPSQQELLRIYEGTVLEQEAGHIDEPIREIIRKFSQTDAAKRPTTSEVLRYKLWLEQKYRSPYTGEVIPLGKLFTPAYQIEHVIPQSLYYDNSFNNKVICEAEVNLLKGNQLGMPFIMRHANEKVVCSMGKQVKIFTPEAYRLFVEEHYRGRKMTILLSEEIPTAFNDRQK

SEQ ID NO: 5383 - protein, 227 aa, unidentified
  REGION 1..227: note = Description of Unknown: uncultivated organism with predicted taxonomy: Bacteroidales
  REGION 1..227: note = MG22-95 HNH domain
SVKQNKEQRERAMTQMAENERRNLRLRAMLEAFLNDRDPIGFDPDANINPGSPNQQLKLRLFEDTAFSYAQANGDDQVEEMLNIRNSITGGSDEKSATPAQIRRYALWLEQNFRSPYTGATISLARLFTDDYQVDHIIPQALYWDDSFNNKVLCEGGVNNTKSNALAFDFIAAHQGETIALPNGRKVTILSMEQYQELVLATYKNNRAKCEKLLMKEIPAEFTQRQL

SEQ ID NO: 5384 - protein, 219 aa, unidentified
  REGION 1..219: note = Description of Unknown: uncultivated organism with predicted taxonomy: Bacteroidales
  REGION 1..219: note = MG22-96 HNH domain
NLNQTAEQRKRDTERNLGNERANLRAKILLTEFLNPEMNVENVRPYSPSQLELLRIFEEGILDDSAGNMPDDIQEIIKKLDSTDIKRRPTESEVLRYRNWLEQGYRSPYTNEIIPLSKLFTTAYQIEHIIPQSLYFNNSYNNKVICEAEVNQLKSNQLGMEFVKNHGGEIVECAFGRKVRILTPEEYTAFVEQHYKHNVHKKNNLLSTELPSEFSSRQL

SEQ ID NO: 5385 - protein, 219 aa, unidentified
  REGION 1..219: note = Description of Unknown: uncultivated organism with predicted taxonomy: Bacteroidetes
  REGION 1..219: note = MG22-97 HNH domain
NLNQTAEQRKRDTERNLGNERANLRAKILLTEFLNPEMNVENVRPYSPSQQELLRIFEEGIIDDSTGNMPDDIQEIIKKLDSSDIKRRPTESEILRYRNWLEQGYRSPYTNEIIPLSKLFTPAYQIEHIIPQSLYFNNSYNNKVICETEVNQLKSNQLGMEFVKNHGGEIVECAFGRKVRILTPEEYTAFVEQHYKHNIHKKNNLLSTELPSEFSSRQL

SEQ ID NO: 5386 - protein, 176 aa, unidentified
  REGION 1..176: note = Description of Unknown: uncultivated organism with predicted taxonomy: Bacteroidales
  REGION 1..176: note = MG22-98 HNH domain
SMKQTSQQRKADNERMQSNYKRNQEVRDKIAEELQQNATNGERPKIGAKKIASYKIWEDQKGRSPYTGKAISDAALLNADGRYDIDHVIPQSRYYDDSLNNKVICEKEVNLKKGNMLGLEFIQKHGGETIQLSSGGEVTILREEEDKKLVNETFKGRKQKIMLMTETPNDFTNRQK

SEQ ID NO: 5387 - protein, 220 aa, unidentified
  REGION 1..220: note = Description of Unknown: uncultivated organism with predicted taxonomy: Flavobacteriales
  REGION 1..220: note = MG22-99 HNH domain
DMRKTAQERKRDSERNSQNFKARQRIKMLLDEFEKMRIDDVHPYSPMHQEKLRIVEDGVFDRVSAKGDEKSKEMLKDMRAFQTNVEKNNVTPGDISRYMLYLEQNYRSPYTNETISMKRLFSSDYEIEHVIPRSRFFDDSMSNKVICEAKVNKEKGNMTGMEFIMKRGGEKIELGEGREVTIVNEKDYRQYVDEVYKNNSRKRKNLLSEDIPGGFSNSQM

SEQ ID NO: 5388 - protein, 217 aa, unidentified
  REGION 1..217: note = Description of Unknown: uncultivated organism with predicted taxonomy: Bacteroidales
  REGION 1..217: note = MG22-100 HNH domain
EMRATAKEREERSARQLRNEQTNLRIKALLQEFMNPALEIEDVRPYSPSQQELLHIYEETVLEQEAGNIDDDIREIIRKFTQTEASKRPTEGEVRRYKLWLEQRYRSPYTGKNIPLGKLFTPAYQIEHVIPQSVYYDNSYNNKVICEAEVNLLKGNMLGMAFIKEHAGEIVPLSLGGEVEILKPDTYREFVEEHYKGRKRQIMLSEEIPTEFTSRQM

SEQ ID NO: 5389 - protein, 217 aa, unidentified
  REGION 1..217: note = Description of Unknown: uncultivated organism with predicted taxonomy: Bacteroidales
  REGION 1..217: note = MG22-101 HNH domain
EMRATAKERESRHNRQLENEQTNLRIKALLQEFMNPEFGIEDVRPYSPNQQELLRIYEDTVLSQEAGRVDEPIREIIRKFSQTDAAKRPTTAEVLRYKLWLEQKYRSPYTGEPISLSKIFTSAYQIEHVIPQSVYYDNSYSNKVICEAEVNLLKGNMLGMPFIMQHAGEKVQCSVGNIVTISTPEAYRAFVEEHYKGKKQKILLSEEIPTNFTARQM

SEQ ID NO: 5390 - protein, 164 aa, unidentified
  REGION 1..164: note = Description of Unknown: uncultivated organism with predicted taxonomy: Clostridia
  REGION 1..164: note = MG23-1 HNH domain
EDGEKGARTVSRKKKLLDLYDAIKHEERELAKVFSDEIDSKTEADFRSKKLYLYYLQQGRCMYSGDIIHLSDLMNDNLYDIDHIYPRHFIKDDSLENNLVLVKKQINNRKQDTFPIERSIQEDMRPFWKSLADSGFISAEKYKRLTRRDAFTDEEKAAFISRQL

SEQ ID NO: 5391 - protein, 162 aa, unidentified
  REGION 1..162: note = Description of Unknown: uncultivated organism with predicted taxonomy: Firmicutes
  REGION 1..162: note = MG23-3 HNH domain
DDAQTKAKNKGKRTKSRKDFLLECYKDDKAWKDELTSVDDGELRAKKLYLYYLQMGRCMYSGEAIDLASLMSGNTMYDIDHIHPRHFVKDDSLENNLVLVKKDKNAHKSDNYPLESEIRNKQFGFWKSLLDKGLITKTKFTRLIRSEDFSPEELAGFINRQL

SEQ ID NO: 5392 - protein, 160 aa, unidentified
  REGION 1..160: note = Description of Unknown: uncultivated organism with predicted taxonomy: Clostridiales
  REGION 1..160: note = MG23-4 HNH domain
EDGEKGERKDSRKKKLLDLYSALKGEEKAWRKEIEDRPEADFRIKKLYLYYRQMGKCMYTGETIELADLFNDNLYDIDHIYPRHFVKDDSIENNLILVKKQKNARKGDSYPIEREIQRARYQLWKMLADKNFISREKHQRLIRTTPFSEEEKAGFISRQL

SEQ ID NO: 5393 - protein, 166 aa, unidentified
  REGION 1..166: note = Description of Unknown: uncultivated organism with predicted taxonomy: Firmicutes
  REGION 1..166: note = MG23-5 HNH domain
DSAQTRARNKGKRTQSRKEFLLNVYKEDKEWRKEIQSCEEIKFRKKKIYLYYLQHGKSLYSGKTIDFDTLLSDNDAYDIDHIYPRHFVKDDSLENNLVLCLKSENAKKGDQYPLRKTFDSAVLSSQEGVWKSLLKQKVITKEKYDRLVRTADFTIDELAGFINRQL

SEQ ID NO: 5394 - protein, 162 aa, unidentified
  REGION 1..162: note = Description of Unknown: uncultivated organism with predicted taxonomy: Clostridiales
  REGION 1..162: note = MG23-6 HNH domain
DSAQTRARNKGKRTQSRKDFLINAYKEDKEWRKEIESRDEAEFRIKKLYLYYVQMGRCMYSGEAIDLHALMAGNEQYDIDHIYPRHFVKDDSLENNLVLVKKTINAHKSDTFPLEAELRKKQYAFWRSLLDRGLITQNKFNRLTRATGFSNEELAGFINRQL

SEQ ID NO: 5395 - protein, 160 aa, unidentified; identical to SEQ ID NO: 5392
  REGION 1..160: note = Description of Unknown: uncultivated organism with predicted taxonomy: Clostridiales
  REGION 1..160: note = MG23-7 HNH domain

SEQ ID NO: 5396 - protein, 160 aa, unidentified; identical to SEQ ID NO: 5392
  REGION 1..160: note = Description of Unknown: uncultivated organism with predicted taxonomy: Clostridiales
  REGION 1..160: note = MG23-8 HNH domain

SEQ ID NO: 5397 - protein, 160 aa, unidentified; identical to SEQ ID NO: 5392
  REGION 1..160: note = Description of Unknown: uncultivated organism with predicted taxonomy: Clostridiales
  REGION 1..160: note = MG23-9 HNH domain

SEQ ID NO: 5398 - protein, 165 aa, unidentified
  REGION 1..165: note = Description of Unknown: uncultivated organism with predicted taxonomy: Clostridiales
  REGION 1..165: note = MG23-10 HNH domain
EHESGNERKASRKKKMLDLYKAIKSEQKQWAEHMIAEIDKSDEADFRIKKLYLYYIQQGKCMYSGDTIDLDLLLKNNNIYDIDHIYPRHFIKDDSIDNNLVLVKKEINNHKSDKYPLESDIREDMSGFWKYLCEKKFITKEKYNRLMRTEKFSAEEKAAFVNRQL

SEQ ID NO: 5399 - protein, 164 aa, unidentified
  REGION 1..164: note = Description of Unknown: uncultivated organism with predicted taxonomy: Butyrivibrio sp. CAG:318
  REGION 1..164: note = MG23-11 HNH domain
EHGKENDRKASRKKKLLDLYSTLKREDKTWAELKIREIEGRTEADFRIKKLYLYYMQQGKCMYSGEKIELNDLFNNNLYDIDHIYPRHFIKDDSLENNLVLVKKEINNHKSDNYPLESDIRKNMNKFWKSLRDKNFISKEKYSRLIRTEEFTDEEKAAFISRQL

SEQ ID NO: 5400 - protein, 164 aa, unidentified
  REGION 1..164: note = Description of Unknown: uncultivated organism with predicted taxonomy: Butyrivibrio sp. CAG:318
  REGION 1..164: note = MG23-12 HNH domain
EHGKENDRKASRKKKLLDLYSALKRENKTWAELKIREIEGKTEADFRIKKLYLYYMQQGKCMYSGEKIELNDLFNNNLYDIDHIYPRHFIKDDSLENNLVLVKKQINNHKSDNYPLENNIRKNMNEFWKTLREKNFISKEKYSRLIRTEEFTDEEKAAFISRQL

SEQ ID NO: 5401 - protein, 165 aa, unidentified
  REGION 1..165: note = Description of Unknown: uncultivated organism with predicted taxonomy: Clostridium sp. AF36-4
  REGION 1..165: note = MG23-13 HNH domain
EHESGNERKASRKKKMLDLYKAIKSEQKQWAEQMIAEIDKRDEADFRIKKLYLYYIQQGKCMYSGDTIDLDLLLKNNNIYDIDHIYPRHFIKDDSIDNNLVLVKKEINNHKSDKYPLESDIREDMSGFWKYLCEKKFITKEKYNRLMRTEKFSAEEKAAFVNRQL

SEQ ID NO: 5402 - protein, 164 aa, unidentified
  REGION 1..164: note = Description of Unknown: uncultivated organism with predicted taxonomy: Butyrivibrio sp. CAG:318
  REGION 1..164: note = MG23-14 HNH domain
EHGKENDRKTSRKKKILDLYSALKREKKEWAELKIREIEGRTEADFRIKKLYLYYLQQGRCMYSGEKIELNDLFNNNLYDIDHIYPRHFIKDDSLENNLVLVKKEINNHKSDNYPLESDIRKNMNEFWKSLREKNFISKEKYSRLIRTEEFTDEEKAAFISRQL

SEQ ID NO: 5403 - protein, 164 aa, unidentified
  REGION 1..164: note = Description of Unknown: uncultivated organism with predicted taxonomy: Butyrivibrio sp. CAG:318
  REGION 1..164: note = MG23-15 HNH domain
EHGKENDRKASRKKKLLDLYSALKRENKTWAELKIREIEGKTEADFRIKKLYLYYMQQGKCMYSGEKIELNDLFNNNLYDIDHIYPRHFIKDDSLENNLVLVKKEINNHKSDNYPLESDIRKNMNKFWKSLREQNFISEEKYSRLIRTEEFTDEEKAAFISRQL

SEQ ID NO: 5404 - protein, 165 aa, unidentified; identical to SEQ ID NO: 5401
  REGION 1..165: note = Description of Unknown: uncultivated organism with predicted taxonomy: Clostridium sp. AF36-4
  REGION 1..165: note = MG23-16 HNH domain

SEQ ID NO: 5405 - protein, 164 aa, unidentified
  REGION 1..164: note = Description of Unknown: uncultivated organism with predicted taxonomy: Butyrivibrio sp. CAG:318
  REGION 1..164: note = MG23-17 HNH domain
EHGKENDRKASRKKKLLDLYSALKRENKTWAELKIREIEGKTEADFRIKKLYLYYMQQGKCMYSGEKIELNDLFNNNLYDIDHIYPRHFIKDDSLENNLVLVKKQINNHKSDNYPLESNIRKNMNEFWKTLREKNFISKEKYSRLIRTEEFTDEEKAAFISRQL

SEQ ID NO: 5406 - protein, 165 aa, unidentified
  REGION 1..165: note = Description of Unknown: uncultivated organism with predicted taxonomy: Clostridiales
  REGION 1..165: note = MG23-18 HNH domain
EHESGNERKASRKKKLLDLYKAVKSEQKQWAEHKITEIDKRDEADFRIKKLYLYYIQHGKCMYSGDTIDLDLLLKNNNIYDIDHIYPRHFIKDDSIDNNLVLVKKEINNHKSDKYPLESDIREDMSGFWKYLCEKKFITKEKYNRLMRTEKFSAEEKAAFVNRQL

SEQ ID NO: 5407 - protein, 164 aa, unidentified; identical to SEQ ID NO: 5402
  REGION 1..164: note = Description of Unknown: uncultivated organism with predicted taxonomy: Butyrivibrio sp. CAG:318
  REGION 1..164: note = MG23-19 HNH domain

SEQ ID NO: 5408 - protein, 164 aa, unidentified; identical to SEQ ID NO: 5399
  REGION 1..164: note = Description of Unknown: uncultivated organism with predicted taxonomy: Butyrivibrio sp. CAG:318
  REGION 1..164: note = MG23-20 HNH domain

SEQ ID NO: 5409 - protein, 164 aa, unidentified
  REGION 1..164: note = Description of Unknown: uncultivated organism with predicted taxonomy: Butyrivibrio sp. CAG:318
  REGION 1..164: note = MG23-21 HNH domain
EHGKENDRKASRKKKLLDLYSALKREDKTWAELKIREIEGRTEADFRIKKLYLYYMQQGRCMYSGEKIELNDLFNNNLYDIDHIYPRHFIKDDSLENNLVLVKKQINNHKSDNYPLESDIRKNMNEFWKSLREKNFISKEKYSRLIRTEEFTDEEKAAFISRQL

SEQ ID NO: 5410 - protein, 164 aa, unidentified; identical to SEQ ID NO: 5399
  REGION 1..164: note = Description of Unknown: uncultivated organism with predicted taxonomy: Butyrivibrio sp. CAG:318
  REGION 1..164: note = MG23-22 HNH domain

SEQ ID NO: 5411 - protein, 164 aa, unidentified; identical to SEQ ID NO: 5405
  REGION 1..164: note = Description of Unknown: uncultivated organism with predicted taxonomy: Butyrivibrio sp. CAG:318
  REGION 1..164: note = MG23-23 HNH domain

SEQ ID NO: 5412 - protein, 165 aa, unidentified
  REGION 1..165: note = Description of Unknown: uncultivated organism with predicted taxonomy: Clostridiales
  REGION 1..165: note = MG23-24 HNH domain
EHESSNERKASRKKKLLDLYKAVKSEQKQWAEHKITEIDKRDEADFRIKKLYLYYIQQGKCMYSGDTIDLDLLLKNNNIYDIDHIYPRHFIKDDSIDNNLVLVKKEINNHKSDKYPLESDIREDMSGFWKYLCEKKFITKEKYNRLMRTEKFSAEEKAAFVNRQL

SEQ ID NO: 5413 - protein, 164 aa, unidentified
  REGION 1..164: note = Description of Unknown: uncultivated organism with predicted taxonomy: Butyrivibrio sp. CAG:318
  REGION 1..164: note = MG23-25 HNH domain
EHGKENDRKASRKKKLLDLYSALKRENKTWAELKIREIEGKTEADFRIKKLYLYYMQQGRCMYSGEKIELNDLFNNNLYDIDHIYPRHFIKDDSLENNLVLVKKQINNHKSDNYPLESNIRKNMNEFWKTLRDKNFISKEKYSRLIRTEEFTDEEKAAFISRQL

SEQ ID NO: 5414 - protein, 164 aa, unidentified; identical to SEQ ID NO: 5399
  REGION 1..164: note = Description of Unknown: uncultivated organism with predicted taxonomy: Butyrivibrio sp. CAG:318
  REGION 1..164: note = MG23-26 HNH domain

SEQ ID NO: 5415 - protein, 164 aa, unidentified; identical to SEQ ID NO: 5399
  REGION 1..164: note = Description of Unknown: uncultivated organism with predicted taxonomy: Butyrivibrio sp. CAG:318
  REGION 1..164: note = MG23-27 HNH domain

SEQ ID NO: 5416 - protein, 164 aa, unidentified; identical to SEQ ID NO: 5405
  REGION 1..164: note = Description of Unknown: uncultivated organism with predicted taxonomy: Butyrivibrio sp. CAG:318
  REGION 1..164: note = MG23-28 HNH domain

SEQ ID NO: 5417 - protein, 164 aa, unidentified; identical to SEQ ID NO: 5399
  REGION 1..164: note = Description of Unknown: uncultivated organism with predicted taxonomy: Butyrivibrio sp. CAG:318
  REGION 1..164: note = MG23-29 HNH domain

SEQ ID NO: 5418 - protein, 164 aa, unidentified; identical to SEQ ID NO: 5403
  REGION 1..164: note = Description of Unknown: uncultivated organism with predicted taxonomy: Butyrivibrio sp. CAG:318
  REGION 1..164: note = MG23-30 HNH domain

SEQ ID NO: 5419 - protein, 164 aa, unidentified; identical to SEQ ID NO: 5399
  REGION 1..164: note = Description of Unknown: uncultivated organism with predicted taxonomy: Butyrivibrio sp. CAG:318
  REGION 1..164: note = MG23-31 HNH domain

SEQ ID NO: 5420 - protein, 164 aa, unidentified
  REGION 1..164: note = Description of Unknown: uncultivated organism with predicted taxonomy: Butyrivibrio sp. CAG:318
  REGION 1..164: note = MG23-32 HNH domain
EHGKENDRKASRKKKLLDLYSALKREDKTWAELKIREIEGKTEADFRIKKLYLYYMQQGRCMYSGEKIELNDLFNNNLYDIDHIYPRHFIKDDSLENNLVLVKKQINNHKSDNYPLESNIRKNMNEFWKTLRDKNFISKEKYSRLIRTEEFTDEEKAAFISRQL

SEQ ID NO: 5421 - protein, 165 aa, unidentified; identical to SEQ ID NO: 5406
  REGION 1..165: note = Description of Unknown: uncultivated organism with predicted taxonomy: Clostridiales
  REGION 1..165: note = MG23-33 HNH domain

SEQ ID NO: 5422 - protein, 164 aa, unidentified; identical to SEQ ID NO: 5405
  REGION 1..164: note = Description of Unknown: uncultivated organism with predicted taxonomy: Butyrivibrio sp. CAG:318
  REGION 1..164: note = MG23-34 HNH domain

SEQ ID NO: 5423 - protein, 164 aa, unidentified
  REGION 1..164: note = Description of Unknown: uncultivated organism with predicted taxonomy: Butyrivibrio sp. CAG:318
  REGION 1..164: note = MG23-35 HNH domain
EHGKENDRKASRKKKLLDLYSALKREDKTWAELKIREIEGRTEADFRIKKLYLYYMQQGRCMYSGEKIELNDLFNNNLYDIDHIYPRHFIKDDSLENNLVLVKKQINNHKSDNYPLESNIRKNMNEFWKTLRDKNFISKEKYSRLIRTEEFTDEEKAAFISRQL

SEQ ID NO: 5424 - protein, 165 aa, unidentified
  REGION 1..165: note = Description of Unknown: uncultivated organism with predicted taxonomy: Clostridiales
  REGION 1..165: note = MG23-36 HNH domain
EHESGNERKASRKKKLLDLYKAVKSEQKQWAEHKITEIDKRDEADFRIKKLYLYYIQQGKCMYSGDTIDLDLLLKNNNIYDIDHIYPRHFIKDDSIDNNLVLVKKEINNHKSDKYPLESDIREDMSGFWKYLCEKKFITKEKYNRLMRTEKFSAEEKAAFVNRQL

SEQ ID NO: 5425 - protein, 165 aa, unidentified; identical to SEQ ID NO: 5412
  REGION 1..165: note = Description of Unknown: uncultivated organism with predicted taxonomy: Clostridiales
  REGION 1..165: note = MG23-37 HNH domain

SEQ ID NO: 5426 - protein, 164 aa, unidentified; identical to SEQ ID NO: 5399
  REGION 1..164: note = Description of Unknown: uncultivated organism with predicted taxonomy: Butyrivibrio sp. CAG:318
  REGION 1..164: note = MG23-38 HNH domain

SEQ ID NO: 5427 - protein, 164 aa, unidentified; identical to SEQ ID NO: 5403
  REGION 1..164: note = Description of Unknown: uncultivated organism with predicted taxonomy: Butyrivibrio sp. CAG:318
  REGION 1..164: note = MG23-39 HNH domain

SEQ ID NO: 5428 - protein, 164 aa, unidentified
  REGION 1..164: note = Description of Unknown: uncultivated organism with predicted taxonomy: Butyrivibrio sp. CAG:318
  REGION 1..164: note = MG23-40 HNH domain
EHGKENDRKASRKKKLLDLYSALKRENKTWAELKIREIEGKTEADFRIKKLYLYYMQQGKCMYSGEKIELNDLFNNNLYDIDHIYPRHFIKDDSLENNLVLVKKQINNHKSDNYPLESDIRKNMNKFWKSLREKNFISEEKYSRLIRTEEFTDEEKAAFISRQL

SEQ ID NO: 5429 - protein, 165 aa, unidentified; identical to SEQ ID NO: 5406
  REGION 1..165: note = Description of Unknown: uncultivated organism with predicted taxonomy: Clostridiales
  REGION 1..165: note = MG23-41 HNH domain

SEQ ID NO: 5430 - protein, 164 aa, unidentified; identical to SEQ ID NO: 5420
  REGION 1..164: note = Description of Unknown: uncultivated organism with predicted taxonomy: Butyrivibrio sp. CAG:318
  REGION 1..164: note = MG23-42 HNH domain

SEQ ID NO: 5431 - protein, 164 aa, unidentified; identical to SEQ ID NO: 5399
  REGION 1..164: note = Description of Unknown: uncultivated organism with predicted taxonomy: Butyrivibrio sp. CAG:318
  REGION 1..164: note = MG23-43 HNH domain

SEQ ID NO: 5432 - protein, 164 aa, unidentified; identical to SEQ ID NO: 5400
  REGION 1..164: note = Description of Unknown: uncultivated organism with predicted taxonomy: Butyrivibrio sp. CAG:318
  REGION 1..164: note = MG23-44 HNH domain

SEQ ID NO: 5433 - protein, 164 aa, unidentified; identical to SEQ ID NO: 5399
  REGION 1..164: note = Description of Unknown: uncultivated organism with predicted taxonomy: Butyrivibrio sp. CAG:318
  REGION 1..164: note = MG23-45 HNH domain

SEQ ID NO: 5434 - protein, 165 aa, unidentified
  REGION 1..165: note = Description of Unknown: uncultivated organism with predicted taxonomy: Clostridiales
  REGION 1..165: note = MG23-46 HNH domain
EHENGNERKASRKKKLLDLYKAIKSEQKQWAEQMIAEIDKRDEADFRIKKLYLYYIQQGKCMYSGDTIDLDLLLKNNNIYDIDHIYPRHFIKDDSIDNNLVLVKKEINNHKSDKYPLESDIKKDMSGFWKYLCEKKFITKEKYNRLMRTDKFSAEEKAAFVNRQL

SEQ ID NO: 5435 - protein, 164 aa, unidentified; identical to SEQ ID NO: 5428
  REGION 1..164: note = Description of Unknown: uncultivated organism with predicted taxonomy: Butyrivibrio sp. CAG:318
  REGION 1..164: note = MG23-47 HNH domain

SEQ ID NO: 5436 - protein, 164 aa, unidentified; identical to SEQ ID NO: 5399
  REGION 1..164: note = Description of Unknown: uncultivated organism with predicted taxonomy: Butyrivibrio sp. CAG:318
  REGION 1..164: note = MG23-48 HNH domain

SEQ ID NO: 5437 - protein, 165 aa, unidentified; identical to SEQ ID NO: 5412
  REGION 1..165: note = Description of Unknown: uncultivated organism with predicted taxonomy: Clostridiales
  REGION 1..165: note = MG23-49 HNH domain

SEQ ID NO: 5438 - protein, 164 aa, unidentified
  REGION 1..164: note = Description of Unknown: uncultivated organism with predicted taxonomy: Clostridiales
  REGION 1..164: note = MG23-50 HNH domain
EEGIKNERKNSRKKKLLELYTSIKNEQKAWSEVKIREIDGRTETDFRIKKLYLYYLQHGKCMYSGEKIELNDLFNNNLYDIDHIYPRHFIKDDSIENNLVLVKKQINNHKSDTFPIESSIQKNMMTFWKTLVEHNFITKEKYNRLMRTEEFTDEEKAAFISRQL

SEQ ID NO: 5439 - protein, 165 aa, unidentified
  REGION 1..165: note = Description of Unknown: uncultivated organism with predicted taxonomy: Clostridiales
  REGION 1..165: note = MG23-51 HNH domain
EHENGNERKASRKKKLLDLYKAIKSEQKQWAEQMIAEIDKRDEADFRIKKLYLYYIQQGKCMYSGDTIDLDLLLKNNNIYDIDHIYPRHFIKDDSIDNNLVLVKKEINNHKSDKYPLESDIREDMSGFWKYLCEKKFITKEKYNRLMRTEKFSAEEKAAFVNRQL

SEQ ID NO: 5440 - protein, 164 aa, unidentified; identical to SEQ ID NO: 5420
  REGION 1..164: note = Description of Unknown: uncultivated organism with predicted taxonomy: Butyrivibrio sp. CAG:318
  REGION 1..164: note = MG23-52 HNH domain

SEQ ID NO: 5441 - protein, 164 aa, unidentified; identical to SEQ ID NO: 5399
  REGION 1..164: note = Description of Unknown: uncultivated organism with predicted taxonomy: Butyrivibrio sp. CAG:318
  REGION 1..164: note = MG23-53 HNH domain

SEQ ID NO: 5442 - protein, 164 aa, unidentified; identical to SEQ ID NO: 5405
  REGION 1..164: note = Description of Unknown: uncultivated organism with predicted taxonomy: Butyrivibrio sp. CAG:318
  REGION 1..164: note = MG23-54 HNH domain

SEQ ID NO: 5443 - protein, 164 aa, unidentified; identical to SEQ ID NO: 5399
  REGION 1..164: note = Description of Unknown: uncultivated organism with predicted taxonomy: Butyrivibrio sp. CAG:318
  REGION 1..164: note = MG23-55 HNH domain

SEQ ID NO: 5444 - protein, 164 aa, unidentified; identical to SEQ ID NO: 5405
  REGION 1..164: note = Description of Unknown: uncultivated organism with predicted taxonomy: Butyrivibrio sp. CAG:318
  REGION 1..164: note = MG23-56 HNH domain

SEQ ID NO: 5445 - protein, 164 aa, unidentified; identical to SEQ ID NO: 5399
  REGION 1..164: note = Description of Unknown: uncultivated organism with predicted taxonomy: Butyrivibrio sp. CAG:318
  REGION 1..164: note = MG23-57 HNH domain

SEQ ID NO: 5446 - protein, 164 aa, unidentified; identical to SEQ ID NO: 5405
  REGION 1..164: note = Description of Unknown: uncultivated organism with predicted taxonomy: Butyrivibrio sp. CAG:318
  REGION 1..164: note = MG23-58 HNH domain

SEQ ID NO: 5447 - protein, 165 aa, unidentified; identical to SEQ ID NO: 5406
  REGION 1..165: note = Description of Unknown: uncultivated organism with predicted taxonomy: Clostridiales
  REGION 1..165: note = MG23-59 HNH domain

SEQ ID NO: 5448 - protein, 165 aa, unidentified
  REGION 1..165: note = Description of Unknown: uncultivated organism with predicted taxonomy: Clostridiales
  REGION 1..165: note = MG23-60 HNH domain
EHESGNERKASRKKKLLDLYKAVKSEQKQWAEHKITEIDKRDEADFRIKKLYLYYIQQGKCMYSGDTIDLDLLLKNNNIYDIDHIYPRHFIKDDSIDNNLVLVKKEINNHKSDKYPLESDIREDMSGFWKYLCEKKFITKEKYNRLMRTEKFSAEEKATFVNRQL

SEQ ID NO: 5449 - protein, 93 aa, unidentified
  REGION 1..93: note = Description of Unknown: uncultivated organism with predicted taxonomy: Clostridiales
  REGION 1..93: note = MG23-61 HNH domain
EHENGNERKASRKKKLLDLYKAIKSEQKQWAEQMIAEIDKRDEADFRIKKLYLYYIQQGKCMYSGDTIDLDLLLKNNNIYDIDHIYPRHFIKD

SEQ ID NO: 5450 - protein, 164 aa, unidentified; identical to SEQ ID NO: 5405
  REGION 1..164: note = Description of Unknown: uncultivated organism with predicted taxonomy: Butyrivibrio sp. CAG:318
  REGION 1..164: note = MG23-62 HNH domain

SEQ ID NO: 5451 - protein, 164 aa, unidentified
  REGION 1..164: note = Description of Unknown: uncultivated organism with predicted taxonomy: Butyrivibrio sp. CAG:318
  REGION 1..164: note = MG23-63 HNH domain
EHGKENDRKASRKKKLLDLYSTLKREDKTWAELKIREIEGRTEADFRIKKLYLYYMQQGRCMYSGEKIELNDLFNNNLYDIDHIYPRHFIKDDSLENNLVLVKKQINNHKSDNYPLESNIRKNMNEFWKTLREKNFISKEKYSRLIRTEEFTDEEKAAFISRQL

SEQ ID NO: 5452 - protein, 165 aa, unidentified; identical to SEQ ID NO: 5434
  REGION 1..165: note = Description of Unknown: uncultivated organism with predicted taxonomy: Clostridiales
  REGION 1..165: note = MG23-64 HNH domain

SEQ ID NO: 5453 - protein, 165 aa, unidentified; identical to SEQ ID NO: 5398
  REGION 1..165: note = Description of Unknown: uncultivated organism with predicted taxonomy: Clostridiales
  REGION 1..165: note = MG23-65 HNH domain

SEQ ID NO: 5454 - protein, 164 aa, unidentified; identical to SEQ ID NO: 5423
  REGION 1..164: note = Description of Unknown: uncultivated organism with predicted taxonomy: Butyrivibrio sp. CAG:318
  REGION 1..164: note = MG23-66 HNH domain

SEQ ID NO: 5455 - protein, 164 aa, unidentified; identical to SEQ ID NO: 5405
  REGION 1..164: note = Description of Unknown: uncultivated organism with predicted taxonomy: Butyrivibrio sp. CAG:318
  REGION 1..164: note = MG23-67 HNH domain

SEQ ID NO: 5456 - protein, 164 aa, unidentified; identical to SEQ ID NO: 5423
  REGION 1..164: note = Description of Unknown: uncultivated organism with predicted taxonomy: Butyrivibrio sp. CAG:318
  REGION 1..164: note = MG23-68 HNH domain

SEQ ID NO: 5457 - protein, 164 aa, unidentified
  REGION 1..164: note = Description of Unknown: uncultivated organism with predicted taxonomy: Butyrivibrio sp. CAG:318
  REGION 1..164: note = MG23-69 HNH domain
EHGKENDRKASRKKKLLDLYSALKRENKTWAELKIREIEGKTEADFRIKKLYLYYMQQGKCMYSGEKIELNDLFNNNLYDIDHIYPRHFIKDDSLENNLVLVKKEINNHKSDNYPLESDIRKNMNKFWKSLRDKNFISKEKYSRLIRTEEFTDEEKAAFISRQL

SEQ ID NO: 5458 - protein, 164 aa, unidentified; identical to SEQ ID NO: 5405
  REGION 1..164: note = Description of Unknown: uncultivated organism with predicted taxonomy: Butyrivibrio sp. CAG:318
  REGION 1..164: note = MG23-70 HNH domain

SEQ ID NO: 5459 - protein, 140 aa, unidentified
  REGION 1..140: note = Description of Unknown: uncultivated organism with predicted taxonomy: Butyrivibrio sp. YAB3001
  REGION 1..140: note = MG23-71 HNH domain
EEGEKGKRTESRKKKLEFLYKGQKQFLQEIGKRDERDFRQKKLYLYYLQNGKSMYTGNEIDLDELLSNNSKYDIDHIYPRHYIKDDSLDNNLVLVEKEINNDIKGGDYPISKTIQSKMRSFWKELQEKGFITSEKYNRLV

SEQ ID NO: 5460 - protein, 164 aa, unidentified
  REGION 1..164: note = Description of Unknown: uncultivated organism with predicted taxonomy: Eubacterium
  REGION 1..164: note = MG23-72 HNH domain
EEGIKNERKNSRKKKLLELYTSIKNEQKAWSEVKIREIDGRTETDFRIKKLYLYYLQQGKCMYSGEKIELNDLFNNNLYDIDHIYPRHFIKDDSIENNLVLVKKQINNHKSDTFPIESSIQKNMMTFWKTLVEHNFITKEKYNRLMRTEEFTDEEKAAFISRQL

SEQ ID NO: 5461 - RNA, 121 nt, synthetic construct
  source 1..121: mol_type = other RNA
nnnnnnnnnnnnnnnnnnnnnngttttgatttactcgaaagagtccaatcataattgaccggagaataattgattcctctacaatgtacgaataaattcattctctaaaccttaaaaattt

SEQ ID NO: 5462 - RNA, 99 nt, synthetic construct
  source 1..99: mol_type = other RNA
nnnnnnnnnnnnnnnnnnnnnngttttgacttgaaaaagtcttaactgattttgccgaattttaagctctacgtagtaccttggaattcggcatatttt

SEQ ID NO: 5463 - RNA, 99 nt, synthetic construct
  source 1..99: mol_type = other RNA
nnnnnnnnnnnnnnnnnnnnnngttttgacttgaaaaagtcttaactgattttgccgaatttcaagctctgcattgcaccttggcattcggcatatttt

SEQ ID NO: 5464 - RNA, 99 nt, synthetic construct
  source 1..99: mol_type = other RNA
nnnnnnnnnnnnnnnnnnnnnngttttgactttgaaaaaagtcttaactgattttgccgaattttaagctctgcatggcaccttgaaattcggcatttt

SEQ ID NO: 5465 - RNA, 100 nt, synthetic construct
  source 1..100: mol_type = other RNA
nnnnnnnnnnnnnnnnnnnnnngctttgccttggaaacaagacaaagttaattaaggcagttcggacctctactttgtacgtcaggatagaaagcctttt

SEQ ID NO: 5466 - RNA, 110 nt, synthetic construct
  source 1..110: mol_type = other RNA
nnnnnnnnnnnnnnnnnnnnnngttgagaatcgaaagattcttaataaggcatccttccgatgctgacttctcaccgtccgttttccaataggagcgggcggtatgtttt

SEQ ID NO: 5467 - RNA, 110 nt, synthetic construct
  source 1..110: mol_type = other RNA
nnnnnnnnnnnnnnnnnnnnnngttgggaaccgaaaggttcccaataaggcgcatcttggcgctgacttctcaccgtcctcttgctgcttagcagagggcggtatgtttt

SEQ ID NO: 5468 - RNA, 124 nt, synthetic construct
  source 1..124: mol_type = other RNA
nnnnnnnnnnnnnnnnnnnnnngctgtggcttgcgggggaaaccccttgtcacagtaagggactttcgttcgcgaaaggcaacctcgccagcatcgctgggcgaggaccagggcaaggcgattt

SEQ ID NO: 5469 - RNA, 118 nt, synthetic construct
  source 1..118: mol_type = other RNA
nnnnnnnnnnnnnnnnnnnnnngtcttgagcgaaagctccagacaaggggagccacttaagtggcttacccgtaaagtaacccccgttcaatcttcggattgggcggggcgaactttt

SEQ ID NO: 5470 - RNA, 118 nt, synthetic construct
  source 1..118: mol_type = other RNA
nnnnnnnnnnnnnnnnnnnnnngttgtaattccctagaaataggttattacaataaggtccaacaggagtgttggtaccgtaaagctctaacggcacccacgggtgccgttatctttt

SEQ ID NO: 5471 - RNA, 162 nt, synthetic construct
  source 1..162: mol_type = other RNA
nnnnnnnnnnnnnnnnnnnnnngttgtgaattgctttaaattgaaaaatttaagcaattcacaataaggattattccgttgtgaaaacatttaaagcggggtcaacagcctcgctttctttttgagtctatgagacattaggtcaataagtctatgagtttt

SEQ ID NO: 5472 - RNA, 101 nt, synthetic construct
  source 1..101: mol_type = other RNA
nnnnnnnnnnnnnnnnnnnnnngtttgagagtagtgaaaactacgagttcaaatacaattttttcaaattgccctatagggccctcacagtgtgagatttt

SEQ ID NO: 5473 - RNA, 117 nt, synthetic construct
  source 1..117: mol_type = other RNA
nnnnnnnnnnnnnnnnnnnnnngttgtagttccccttttgaaaaaaagtgtgttactgcaataaggtaaaacaccacgaagctctgccctaactgccttagcagttagggcatcttt

SEQ ID NO: 5474 - RNA, 134 nt, synthetic construct
  source 1..134: mol_type = other RNA
nnnnnnnnnnnnnnnnnnnnnngttgtgaattgctttcaaattagaaataattgaaagcaattcgcaataaggattattccgttgtgaaaacatttcgagtggcttcgtgaaattcacgaagtcacttcgtttt

SEQ ID NO: 5475 - RNA, 113 nt, synthetic construct
  source 1..113: mol_type = other RNA
nnnnnnnnnnnnnnnnnnnnnngtttgagaacctgaaaaggtgagtgcaaataaggtttaaccgaaattgtttacctgcattgtgcagtataagaaagaccgcgaggtctttt

SEQ ID NO: 5476 - RNA, 99 nt, synthetic construct
  source 1..99: mol_type = other RNA
taaaatattttaagttaagagtccaatcataattgaccggagaataattgattcctctacaatgtacgaataaattcattctctaaaccttaaaaattt

SEQ ID NO: 5477 - RNA, 72 nt, synthetic construct
  source 1..72: mol_type = other RNA
ttagttgtaaagtcttaactgattttgccgaattttaagctctacgtagtaccttggaattcggcatatttt

SEQ ID NO: 5478 - RNA, 72 nt, synthetic construct
  source 1..72: mol_type = other RNA
tttgttgtaaagtcttaactgattttgccgaatttcaagctctgcattgcaccttggcattcggcatatttt

SEQ ID NO: 5479 - RNA, 78 nt, synthetic construct
  source 1..78: mol_type = other RNA
agaaaatttttgttgtaaagtcttaactgattttgccgaattttaagctctgcatggcaccttgaaattcggcatttt

SEQ ID NO: 5480 - RNA, 106 nt, synthetic construct
  source 1..106: mol_type = other RNA
ctctccggggggagaagtcttaactgattcggcggcgttgaaaccactgcctagcacgtttcaacgccgccctttattcccaaaactcgacctgctgttgaatttt

SEQ ID NO: 5481 - RNA, 77 nt, synthetic construct
  source 1..77: mol_type = other RNA
gacttttctggggagtgaagtcttaactgatttagccccgcagtgaccactgcttgcacgtcactgcggggcctttt

SEQ ID NO: 5482 - RNA, 383 nt, synthetic construct
  source 1..383: mol_type = other RNA
gataccggagaattttgggcttccctgatagccatttcaaaaagggtttgataggattgtnntataaggtttgtagagcatgttgggaatgtatcttcaaaagaatttgnnggcgtataaaagaaaaactcagaaacacattgttctgagtttttttctgtcccgaccgttgattgnntaaaggtcctttttcttacagacaaacaatgggaaaagtcagtcaattgcatcggaaaagnnaatatgagcacagcaaaaaactcctcgacccagcacagccggaactctttgaaatttggtnnaaaggaaagccacgactggtgcttttctggaaagcagtgcagccgtttctttcctattcgnnttaagatttacccgactcg

SEQ ID NO: 5483 - RNA, 383 nt, synthetic construct; identical to SEQ ID NO: 5482
  source 1..383: mol_type = other RNA

SEQ ID NO: 5484 - RNA, 70 nt, synthetic construct
  source 1..70: mol_type = other RNA
ggggggaaggcttaactgacgtagaggcccgtgacccactgcatcgcacggtcacgggcctcggtgtttt

SEQ ID NO: 5485 - RNA, 70 nt, synthetic construct; identical to SEQ ID NO: 5484
  source 1..70: mol_type = other RNA

SEQ ID NO: 5486 - RNA, 100 nt, synthetic construct
  source 1..100: mol_type = other RNA
acttcaaaaccagcaccccaagtagcgtaggagagcgcgttcgatcttggattcaggtgtgactccactacgaaagccccttgatttctcaagggtcttt

SEQ ID NO: 5487 - RNA, 69 nt, synthetic construct
  source 1..69: mol_type = other RNA
ggcgatttcaaaaccagcacggattcggcagcccctctgcggggcaagcgtaggtagagcgcgccgttt

SEQ ID NO: 5488 - RNA, 108 nt, synthetic construct
  source 1..108: mol_type = other RNA
cgagatcaaaacctgcggtggccagtattccaaactgtcggcttgagagcaggctggttattaaccgcaactcttgcacgggggcgagtgaaagctttagcccctttt

SEQ ID NO: 5489 - RNA, 106 nt, synthetic construct; identical to SEQ ID NO: 5480
  source 1..106: mol_type = other RNA

SEQ ID NO: 5490 - RNA, 101 nt, synthetic construct
  source 1..101: mol_type = other RNA
gccagatcaaaacctgcggaatggtcggttcgagagccacccataagaacccgcaactcgaacacactttccggggcgagccagatgctcgccccgctttt

SEQ ID NO: 5491 - RNA, 70 nt, synthetic construct
  source 1..70: mol_type = other RNA
ttggaatcaagacaaagttaattaaggcagttcggacctctactttgtacgtcaggatagaaagcctttt

SEQ ID NO: 5492 - RNA, 118 nt, synthetic construct
  source 1..118: mol_type = other RNA
ttggaatcaagacaaagttagataacgcaaactgcgtccctatccgccaagcggatacacctgttcaaaagcgtttcttaaagagcctcggcagggagtaatctcggtcggggctttt

SEQ ID NO: 5493 - RNA, 74 nt, synthetic construct
  source 1..74: mol_type = other RNA
ggaatcaagacaaagttagataacgcagaccgtttccctatccgccacgcggatacatcggttcaaaagcgttt

SEQ ID NO: 5494 - RNA, 74 nt, synthetic construct; identical to SEQ ID NO: 5493
  source 1..74: mol_type = other RNA

SEQ ID NO: 5495 - RNA, 82 nt, synthetic construct
  source 1..82: mol_type = other RNA
taacgaaagattcttaataaggcatccttccgatgctgacttctcaccgtccgttttccaataggagcgggcggtatgtttt

SEQ ID NO: 5496 - RNA, 80 nt, synthetic construct
  source 1..80: mol_type = other RNA
aatgaaggttcccaataaggcgcatcttggcgctgacttctcaccgtcctcttgctgcttagcagagggcggtatgtttt

SEQ ID NO: 5497 - RNA, 82 nt, unidentified
  source 1..82: mol_type = other RNA
taacgaaagattcttaataaggcatccttccgatgctgacttctcaccgtccggctcctcttaggaacgggcggtatgtttt

SEQ ID NO: 5498 - RNA, 78 nt, synthetic construct
  source 1..78: mol_type = other RNA
tcttgggagagacattgaaataagcggtttcgtaccgtgaattctccagcccctcggtttaccggggggcttcgtttt

SEQ ID NO: 5499 - RNA, 88 nt, synthetic construct
  source 1..88: mol_type = other RNA
tggtttcggaggcgaacgatcccaataagagacttatgtcttgaattctcagatcccgtccgcattgcgcggacgggatcttcgtttt

SEQ ID NO: 5500 - RNA, 81 nt, synthetic construct
  source 1..81: mol_type = other RNA
agagaagattcccaataaggcacatttttagtgctgacttctcaccgtccagggttcattgaacaatgggcggtatgtttt

SEQ ID NO: 5501 - RNA, 72 nt, synthetic construct
  source 1..72: mol_type = other RNA
tgaaagattctcaacattctacaacttatcacatagcacattgcaattatagcaggagtatatgtagctttt

SEQ ID NO: 5502 - RNA, 82 nt, synthetic construct; identical to SEQ ID NO: 5497
  source 1..82: mol_type = other RNA

SEQ ID NO: 5503 - RNA, 103 nt, synthetic construct
  source 1..103: mol_type = other RNA
agtgtatccgagcggcgattgccccttgtcacagtaagggactttcgttcgcgaaaggcaacctcgccagcatcgctgggcgaggaccagggcaaggcgattt

SEQ ID NO: 5504 - RNA, 98 nt, synthetic construct
  source 1..98: mol_type = other RNA
ttcaactttacgtaagaacaatttgtaagcaattcacaataaaaggtttttaccgttgtgaaaacatattctggcggtaactttagttatcgcctttt

SEQ ID NO: 5505 - RNA, 103 nt, synthetic construct
  source 1..103: mol_type = other RNA
tcaccttggggaagggcgcggctccagacaaggggagccacttaagtggcttacccgtaaagtaacccccgttcaatcttcggattgggcggggcgaactttt

SEQ ID NO: 5506 - RNA, 100 nt, synthetic construct
  source 1..100: mol_type = other RNA
attatatcttagcgagagatagtaggttattacaataaggtccaacaggagtgttggtaccgtaaagctctaacggcacccacgggtgccgttatctttt

SEQ ID NO: 5507 - RNA, 87 nt, synthetic construct
  source 1..87: mol_type = other RNA
ttgtgaattgcttaaattatgtactgcaaaaataaacaaatattattacgaaaaagtttttttaaaaatatttttttacataacttt

SEQ ID NO: 5508 - RNA, 83 nt, synthetic construct
  source 1..83: mol_type = other RNA
ttgactaccataaggaattacactacgagttcaaatacaattttttcaaattgccctatagggccctcacagtgtgagatttt

SEQ ID NO: 5509 - RNA, 92 nt, synthetic construct
  source 1..92: mol_type = other RNA
ttataccactacgagagaaaaagtgtgttactgcaataaggtaaaacaccacgaagctctgccctaactgccttagcagttagggcatcttt

SEQ ID NO: 5510 - RNA, 90 nt, synthetic construct
  source 1..90: mol_type = other RNA
ttgctaattgaaagcaattcgcaataaggattattccgttgtgaaaacatttcgagtggcttcgtgaaattcacgaagtcacttcgtttt

SEQ ID NO: 5511 - RNA, 82 nt, synthetic construct
  source 1..82: mol_type = other RNA
acttacaaggtgagtgcaaataaggtttaaccgaaattgtttacctgcattgtgcagtataagaaagaccgcgaggtctttt

SEQ ID NO: 5512-5537 - skipped (26 entries)

SEQ ID NO: 5538 - RNA, 72 nt, synthetic construct
  source 1..72: mol_type = other RNA
tttgaatcaagatcaaagtaaacggccccgctccggaccctgcctggcactccggatgcgctagggtttttt

SEQ ID NO: 5539 - RNA, 110 nt, synthetic construct
  source 1..110: mol_type = other RNA
nnnnnnnnnnnnnnnnnnnnnngttgagaatcgaaagattcttaataaggcatccttccgatgctgacttctcaccgtccggctcctcttaggaacgggcggtatgtttt

SEQ ID NO: 5540 - RNA, 143 nt, synthetic construct
  source 1..143: mol_type = other RNA
nnnnnnnnnnnnnnnnnnnnnngttgtgaattgaaaaattcacaataaggattattccgttgtgaaaacatttaaagcggggtcaacagcctcgctttctttttgagtctatgagacattaggtcaataagtctatgagtttt

SEQ ID NO: 5541 - DNA, 122 bp, synthetic construct
  source 1..122: mol_type = other DNA
nnnnnnnnnnnnnnnnnnnnnngttgtgaattgctttaaattgaaaaatttaagcaattcacaataaggattattccgttgtgaaaacatttaaagcggggtcaacagcctcgctttctttt

SEQ ID NO: 5542 - DNA, 103 bp, synthetic construct
  source 1..103: mol_type = other DNA
nnnnnnnnnnnnnnnnnnnnnngttgtgaattgaaaaattcacaataaggattattccgttgtgaaaacatttaaagcggggtcaacagcctcgctttctttt

SEQ ID NO: 5543 - RNA, 22 nt, synthetic construct
  misc_feature 1..22: note = Description of Artificial Sequence: Synthetic oligonucleotide
  misc_feature 1..22: note = MG1-4 guide sequence 1 for targeting VEGFA
  source 1..22: mol_type = other RNA
aatatgtagctgtttgggaggt

SEQ ID NO: 5544 - RNA, 22 nt, synthetic construct
  misc_feature 1..22: note = Description of Artificial Sequence: Synthetic oligonucleotide
  misc_feature 1..22: note = MG1-4 guide sequence 2 for targeting VEGFA
  source 1..22: mol_type = other RNA
ctagggggcgctcggccaccac

SEQ ID NO: 5545 - RNA, 22 nt, synthetic construct
  misc_feature 1..22: note = Description of Artificial Sequence: Synthetic oligonucleotide
  misc_feature 1..22: note = MG1-4 guide sequence 3 for targeting VEGFA
  source 1..22: mol_type = other RNA
tggctaaagagggaatgggctt

SEQ ID NO: 5546 - RNA, 22 nt, synthetic construct
  misc_feature 1..22: note = Description of Artificial Sequence: Synthetic oligonucleotide
  misc_feature 1..22: note = MG1-4 guide sequence 4 for targeting VEGFA
  source 1..22: mol_type = other RNA
cacaccccggctctggctaaag

SEQ ID NO: 5547 - RNA, 22 nt, synthetic construct
  misc_feature 1..22: note = Description of Artificial Sequence: Synthetic oligonucleotide
  misc_feature 1..22: note = MG1-4 guide sequence 5 for targeting VEGFA
  source 1..22: mol_type = other RNA
tcggaggagccgtggtccgcgc

SEQ ID NO: 5548 - RNA, 22 nt, synthetic construct
  misc_feature 1..22: note = Description of Artificial Sequence: Synthetic oligonucleotide
  misc_feature 1..22: note = MG1-4 guide sequence 6 for targeting VEGFA
  source 1..22: mol_type = other RNA
gcggaccacggctcctccgaag

SEQ ID NO: 5549 - RNA, 22 nt, synthetic construct
  misc_feature 1..22: note = Description of Artificial Sequence: Synthetic oligonucleotide
  misc_feature 1..22: note = MG1-4 guide sequence 7 for targeting EMX1
  source 1..22: mol_type = other RNA
gtacaaacggcagaagctggag

SEQ ID NO: 5550 - RNA, 23 nt, synthetic construct
  misc_feature 1..23: note = Description of Artificial Sequence: Synthetic oligonucleotide
  misc_feature 1..23: note = MG1-4 guide sequence 8 for targeting EMX1
  source 1..23: mol_type = other RNA
gaggaagggcctgagtccgagca

SEQ ID NO: 5551 - RNA, 22 nt, synthetic construct
  misc_feature 1..22: note = Description of Artificial Sequence: Synthetic oligonucleotide
  misc_feature 1..22: note = MG1-4 guide sequence 9 for targeting Apolipoprotein
  source 1..22: mol_type = other RNA
aaggcaaacatcctgataatgg

SEQ ID NO: 5552 - RNA, 22 nt, synthetic construct
  misc_feature 1..22: note = Description of Artificial Sequence: Synthetic oligonucleotide
  misc_feature 1..22: note = MG1-6 guide sequence 1 for targeting VEGFA
  source 1..22: mol_type = other RNA
tctttagccagagccggggtgt

SEQ ID NO: 5553 - RNA, 22 nt, synthetic construct
  misc_feature 1..22: note = Description of Artificial Sequence: Synthetic oligonucleotide
  misc_feature 1..22: note = MG1-6 guide sequence 2 for targeting VEGFA
  source 1..22: mol_type = other RNA
tggaccccctatttctgacctc

SEQ ID NO: 5554 - RNA, 22 nt, synthetic construct
  misc_feature 1..22: note = Description of Artificial Sequence: Synthetic oligonucleotide
  misc_feature 1..22: note = MG1-6 guide sequence 3 for targeting EMX1
  source 1..22: mol_type = other RNA
atgggagcccttcttcttctgc

SEQ ID NO: 5555 - RNA, 22 nt, synthetic construct
  misc_feature 1..22: note = Description of Artificial Sequence: Synthetic oligonucleotide
  misc_feature 1..22: note = MG1-6 guide sequence 4 for targeting EMX1
  source 1..22: mol_type = other RNA
tgccacgaagcaggccaatggg

SEQ ID NO: 5556 - RNA, 22 nt, synthetic construct
  misc_feature 1..22: note = Description of Artificial Sequence: Synthetic oligonucleotide
  misc_feature 1..22: note = MG1-6 guide sequence 5 for targeting HBB-R01
  source 1..22: mol_type = other RNA
tggtgtctgtttgaggttgcta

SEQ ID NO: 5557 - RNA, 22 nt, synthetic construct
  misc_feature 1..22: note = Description of Artificial Sequence: Synthetic oligonucleotide
  misc_feature 1..22: note = MG1-6 guide sequence 6 for targeting HBB-R01
  source 1..22: mol_type = other RNA
gggcaggttggtatcaaggtta

SEQ ID NO: 5558 - RNA, 22 nt, synthetic construct
  misc_feature 1..22: note = Description of Artificial Sequence: Synthetic oligonucleotide
  misc_feature 1..22: note = MG1-6 guide sequence 7 for targeting FANCF
  source 1..22: mol_type = other RNA
aggtgctgacgtaggtagtgct

SEQ ID NO: 5559 - RNA, 22 nt, synthetic construct
  misc_feature 1..22: note = Description of Artificial Sequence: Synthetic oligonucleotide
  misc_feature 1..22: note = MG1-6 guide sequence 8 for targeting FANCF
  source 1..22: mol_type = other RNA
gccctacttccgctttcacctt

SEQ ID NO: 5560 - RNA, 22 nt, synthetic construct
  misc_feature 1..22: note = Description of Artificial Sequence: Synthetic oligonucleotide
  misc_feature 1..22: note = MG1-6 guide sequence 9 for targeting IVS40
  source 1..22: mol_type = other RNA
aatgtatgctggcttttaaggg

SEQ ID NO: 5561 - RNA, 22 nt, synthetic construct
  misc_feature 1..22: note = Description of Artificial Sequence: Synthetic oligonucleotide
  misc_feature 1..22: note = MG1-6 guide sequence 10 for targeting IVS40
  source 1..22: mol_type = other RNA
gctcctttggctagggaagtgt

SEQ ID NO: 5562 - RNA, 22 nt, synthetic construct
  misc_feature 1..22: note = Description of Artificial Sequence: Synthetic oligonucleotide
  misc_feature 1..22: note = MG3-7 guide sequence 1 for targeting VEGFA
  source 1..22: mol_type = other RNA
cccctatttctgacctcccaaa

SEQ ID NO: 5563 - RNA, 22 nt, synthetic construct
  misc_feature 1..22: note = Description of Artificial Sequence: Synthetic oligonucleotide
  misc_feature 1..22: note = MG3-7 guide sequence 2 for targeting EMX1
  source 1..22: mol_type = other RNA
tgtggttccagaaccggaggac

SEQ ID NO: 5564 - RNA, 22 nt, synthetic construct
  misc_feature 1..22: note = Description of Artificial Sequence: Synthetic oligonucleotide
  misc_feature 1..22: note = MG3-7 guide sequence 3 for targeting HBB-R01
  source 1..22: mol_type = other RNA
ggccctgggcaggttggtatca

SEQ ID NO: 5565 - RNA, 22 nt, synthetic construct
  misc_feature 1..22: note = Description of Artificial Sequence: Synthetic oligonucleotide
  misc_feature 1..22: note = MG3-7 guide sequence 4 for targeting HBB-R01
  source 1..22: mol_type = other RNA
tccttaaacctgtcttgtaacc

SEQ ID NO: 5566 - RNA, 22 nt, synthetic construct
  misc_feature 1..22: note = Description of Artificial Sequence: Synthetic oligonucleotide
  misc_feature 1..22: note = MG3-7 guide sequence 5 for targeting HBB-R01
  source 1..22: mol_type = other RNA
ctgactcctgaggagaagtctg

SEQ ID NO: 5567 - RNA, 22 nt, synthetic construct
  misc_feature 1..22: note = Description of Artificial Sequence: Synthetic oligonucleotide
  misc_feature 1..22: note = MG3-7 guide sequence 6 for targeting FANCF
  source 1..22: mol_type = other RNA
tccgagcttctggcggtctcaa

SEQ ID NO: 5568 - RNA, 22 nt, synthetic construct
  misc_feature 1..22: note = Description of Artificial Sequence: Synthetic oligonucleotide
  misc_feature 1..22: note = MG3-7 guide sequence 7 for targeting FANCF
  source 1..22: mol_type = other RNA
tatcatttcgcggatgttccaa

SEQ ID NO: 5569 - RNA, 22 nt, synthetic construct
  misc_feature 1..22: note = Description of Artificial Sequence: Synthetic oligonucleotide
  misc_feature 1..22: note = MG3-7 guide sequence 8 for targeting Apolipoprotein
  source 1..22: mol_type = other RNA
tcgggcagagggtgcatcacct

SEQ ID NO: 5570 - RNA, 22 nt, synthetic construct
  misc_feature 1..22: note = Description of Artificial Sequence: Synthetic oligonucleotide
  misc_feature 1..22: note = MG3-7 guide sequence 9 for targeting Fibrinogen
  source 1..22: mol_type = other RNA
ataataagcagaacttttagtg

SEQ ID NO: 5571 - RNA, 22 nt, synthetic construct
  misc_feature 1..22: note = Description of Artificial Sequence: Synthetic oligonucleotide
  misc_feature 1..22: note = MG3-7 guide sequence 10 for targeting Fibrinogen
  source 1..22: mol_type = other RNA
gttttctttagttattaatttc

SEQ ID NO: 5572 - DNA, 3075 bp, synthetic construct
  misc_feature 1..3075: note = Description of Artificial Sequence: Synthetic polynucleotide
  misc_feature 1..3075: note = MG1-4 sequence codon optimized for E. coli
  source 1..3075: mol_type = other DNA
atgaaaaagaaagttttcgcatttgatcttggtaaagcaagtattggttactgcgtccgtgacggatttaatatcaatgaagctaatagtattatcatcgataaagatcatgccgagaccatgtctctgcgtgaccgtcgccggattaaaaaaacactcgacgcccatcatgcacgtgaggaatacttcaacaaagtttggtcgggcgtaggcctcaacatcttagataaaaataacaacaacttcaaaaaagagtttccctctaaaaacgaggacgtaatctacacctcctgcttgctgcgcatcgcgctgctccagaatcaaaaattagaggagtggcagatttataaggcgctgtataatgctttccagcgtcgtggttacgatgttaatatcgcatggaagagcgttcaaacagacgacgacaaggaaaacatcgaacgcatgaaaaaatatacatgcgaaaacgatatcgaactgattatcagcgatgagtacaaatatccctgttactatgatgctttgcgtttgggcctgtggaacgaagatgaacccacgaaattgaaccgttcaattccacaacacaatagcaataaggtccgcactactgaatatgtcgcgccgcgcgaactcgtagaaaaggaactcaagcagctgtggttaaacgcgcagctgcaactgccccagttaaacagtatttcagccgaggaattcttatacggcgaatacaaaattccatatggtagctgcgtacaaaaggaattcaaacagtatcgtggcacaaaaaaagactggcaaggtgttctgtgtcagaagattccgcgcttcgataaccgcattattgctaagtgcaaactgctgccgaaacgcaacgtatgtaaagctaacactattgagaacgtaagtttcgtcctgctgatgaaacttaagaatcttcgcttcaccgtaatttccggtgaaaaattgcgtttgtcgccggtccagattaaacaaatttatgaaaactggcttgaaaaagtagaagatacgtataataaggacctggaaaaggccgaaaaattaggtaaagagaacccggaaaaacgcttgaatatcactattacccgccaggaaatcgagaaaatcattggggaaaaaattattgataagatcgaacccatgaaagcagatattagtggtcgctcgagtttttgtcgtcgtgcctgccaaatcatgaacaaaattatcctggacggcgaactctatccgcagaacgtggacattagtgagttcgtggaccgcgataacgcaaaaaatggcatcacggaagaggaaatccagtcaatgttatccaagattggtgactggaataacctgtatattccggataatcgcgaggaaaatgctcagaacgctagcaattcgcgtattaaaactgacattatgttaggcaacattaccaatccgattgtacgtaaccgcttgcagatctttcgtgatcttttgctgaacttggcggaaaaatacgggaccccggacgaagtcatttttgagttcgtgcgcgatggcgcagataactccctgtacggcagcaagaaggcacaggataccgaacgctttatgaaacagcaagagaaggaaaacgaacaaatcattaatgaactgaaagatgcgggcttatatgtcaacggtcaaaatcatgcaaatgccacgtacttcctgatgcacaaactcctgaaaagtcagggtggcaagtgtatctacagtggccaaaacatcagcccgtctaactatgacgaatgcgagattgatcatatttatcctcgtacgctgggaggcaacgacgctctctacaacaaagtggtttgttatcgtcgtgaaaaccaggacaaaaaaggccgcaccccgtatgaatggctgagtccggacagcgataaatgggctaattacgtcaatcgccttaacaagatcaagaaacagctggggaagaaaaaattcgaactgctgacctctaagccagaagattgtgaaaaactgatcgaaagttataacggtctcgcggagactagtcatattgcacgcgtagctcaacagatgactgctttcatctttggctggggtctgcagatccagggtgagagccggcgtattttcgtgaataacggctcttcgacctgtgccatccgcaaacgctatgggttaaacaaattactgggcgataacctgaaaaaaaatcgctctaacgataaacaccacgcccttgacgctatttgcatcagtttttctcgtgattttaaatatgacaaagaaattaaaaaagacatcattaagggtttcaatccggaaattgtcaagaacgcgatcgataaaatcatgccttatccctatgcaaatgataagccgtttaaaggtaacaccaaacccctggaaactatctacggtcttcgtacgtacggcgacaaaagttatattactcagcgcgttgaactgaactcgattgataaaaaagcgactaaaattaaatcgattatcgatgaaaccatcaagaatgacttgctgaataaactgaaggaaaacccgacagagcaggagtggaaactgatgctgcaaaattatattcatcctaaaaaacagactaaagtgaaaaaggtgatgatttctgtgtcagagggagagattactaaagatagcaacaatcgcgagcgcatgggcgaatttgttgactttggcacgaagggcactcagcatcagtttaaacattctaaacgccataagggccaaatcctgtattttaatgaaaaaggcgtcgtggaggtaatgccggtttattcgaatatcaaaaccacggacgtgaaagataaacttcagaatatggggtgtaaactgtataacaagggccagatgttctacagcggttgtctggttgatatcccaaaaccattcaaagcgggctcgaaggagtatcctgctggccgctaccaaatcaaaacgattcgcagtgataaagtggccgaactggaagacgcctgcggtaacaagatcagtacgaatgtgaaatacctggtacctgccgaatttaaaaaagtcgaaagcaaa

SEQ ID NO: 5573 - DNA, 3231 bp, synthetic construct
  misc_feature 1..3231: note = Description of Artificial Sequence: Synthetic polynucleotide
  misc_feature 1..3231: note = MG1-5 sequence codon optimized for E. coli
  source 1..3231: mol_type = other DNA
atgcacactaaagagacggtttggggatttgatattggtaagggatctttaggtgaggcggtccgcgtcggcaacgaatttaagcacgtacttagcatggagatcgatgctgacttcgcagagatcaagacggccgcggctacacgccgcgcatggcgtacgcgtgaggcccacaaggcccgtgagatgtggcttgaaaagtgcctgagtgacgcggacattgagatcttaggccgtcgtaaagtggatatcgtggacggcacctggaagctggtttcccgtggtgacggccgtttagagcgcgagtttccggcggatggcgagaatgtatgctacaattctattgcgttgcgttgtaagcttctcctgggtgagaagctggagtcctggcaggtctttaaagctttaaattcagcaattcagaatcgcggatacgacgcgcaaatcccatggggcgacgaagacggaaagtcgtccgaaacaaagcgttccggcaagtccgattccgccaagaagtcgggcgaggatgaaagttatgcagagcgtctggcattgtttgaacgtgagttcgacaagctgttggcggaagtagaaaatcgtgagaagtatgacttcccgtgtttcttcaaggcagcgaagatgggactttggtcaccagagaaccctgacaaggtcggcatccgtattgataataccgcggagaaggcaaagggatatgtggtgccccgcaatgcggttatcgcggagtttcgcgcgcttgttaatgctgccgcaaaacaatacccgaagttgaagggaaaggccgattttatcatgttcggaaaggccgaagaagcatacgcctcgtacaagcctgaattacgtcgcaagtttggcctgcgccgcggcgctgattcagactggactgctctcggtcagaaaacaccccgcttcgacaaccgcattatcgggaagtgtaagcttatcccgcgtctgaatgtctgcaagatcaaacctctgaaggagtgtaaggccgaggatgatttcttaccgcatacgatcacgctggccttgaagctgcttaatcttcgcttcttccgtggcgccggcatcgactcgttatcgttcgacgagtttcttcgcgcctttgaaattgcccgccaaaataagtttgccctgaacaagacgaatctcaagaagttcttcaagactatcggagcggagattatggacgagaatcaatccagtgtggaacagccccgcgagggtgggcgtgccagctacagtcgtccagcgatgcgccttctccgcgatctgatcttcagtgggaagtccccggctgagttctacgcatcccgtatttgcaagattgagaataccgataagaatcgcggactggttgcggaagacttggcgttcattaaattgatgggtgatattccctggaacggtatctttgttccagacgttgacacattcaattttgcgaatattcgcgagtccgagcgtgcagataagatcaacaagctgattggcagccaaaatgacccaatcgtgcgccaccgtctggcattcttctatgagcgcattaagctgcttgaatctaaattcggagcacccgacaagatcgtgttagagtttgttcgtgacgacttcttagggtctaaggcaaagaaagagatgtcgcagggtatcaagaagcgtttcgaggaaaagaagaaacttgcagaggagttagacagtcagcgtgccgagtttggtaacaaatacgcgtccaagaagatgcttttaaagtttgagctgtataagaagcaacgcggacgttgcgtgtacacggacaatgcgttgccgctgtctgaacttgagaacttagaggttgaacacattttcccgcgcagccgcggcggcgccgacgcaatgtacaactatgtccttactgacgagaacactaacaagcagaaaggggacaagaccccgtttgagtggttaagcagcgacaagacaaaatgggaatcttactgtgatcgcgtgcgtagtttaacccagagcctgggcgccaaacgctgcaagttgcttgtaagtccaaatgcagaagagctcatgcagaaatacacagcgctcgccgagactgcctggatctccaagctggcgcaaaagatttgctgtatccacttcggctttcagtttggcggcttaaagggtgagaagaaggtctggactgtgagcggaaataccacggccatgattcgtggccgttacggtttaaaccgccttctgcataatgaagagatcagtgaggacctgccgctgttagatcgcatcgtaaaggaaaagaacttcgaggaaaagaatcgtgataataagaagcaccacgcgttagacgctatgtgtatctgtttcgcgcctacgagcaatgcgaagaaagcgctctcacgtaagaacatcttgcccgaggaaattgcaaagaaccccgaatccgacgacgcccgtaatttcttcgcgaagtatctggccgaggttgttcccactaaggtggcgattaagaagccggagctggagcaaacaatctactccaagcgtgtaatcggtggccgtcaaactattgtgaagaagtgtaacgtgcgcgatcttgcttacaagggtcaaaacccaaagtacgacttcgacacgcttacgaagcgcatcaaggatatcatcaatccggttagcaagcgcgtcattgaagattttgcgaagaccgaaccaaccgaggcggagtgggaagattggtgtaagtacgaagcggcaatcccaagtaagaatggttctccgacgcgcttgcttcgtgtattatgcaagacgaaggacgatgccgagcgttttaaggatttgtcaaaggatggctgcggtgcgtatcgtaagtccaagtcgcacaaaggccagtttatctggaaggataacaagggcaattatctcgttgctccggtttacatttacagcagcaagcagaaggtgtatgcggaactcaagaataaccctaagtgtatgggcatttgcgatttcttcaagacgggctgcctggtgaagatcagcaacgaggtggttgacgagaagaagaatcgtctctggttaaaggcgggcttttacaacctcaacagcatcgccaaggagaagcgtgtgtatcttaccgatgtaaacggccaggagcacaagaagattccgctgcaacatttgatgaacgcaggaatgaagcgtgtcgagacgaatacaatc

SEQ ID NO: 5574 - DNA, 3177 bp, synthetic construct
  misc_feature 1..3177: note = Description of Artificial Sequence: Synthetic polynucleotide
  misc_feature 1..3177: note = MG1-6 sequence codon optimized for E. coli
  source 1..3177: mol_type = other DNA
atggagaaagaaaagaacaaccatgtttggggctttgatattggcaaagggtctctgggtgaagcagttcgggttggtggcgattttaagcatattgcctcagttctgcttgacccggaatttggggaaatcaaaactgcggccctggctcgccgtcagatgcgcacacggaaagcccataaagctcgcgagaaatggctcgaggagtgtctcgacggcaccggtgtggagattctcaaacgccgcgaagtgggaattgttgatgggcagtggcgccttatctcgaaaggtgatgaacgcctggaacgcgaatttccgccgaacggcgaggaagtgtgctacaactctattgccctgcgttgtaaattattgctgggcgagaaattggaagggtggcaggtctttaaagccctgaacagcgctattcagaaacgcggatacgatgagaatatcccttggggggaagccgaggaaaagtccagcaaaaaggacgaagatgattacgcgcagaaattaagccaatacgagcgtgaaaaatctgaactgtttgaaagttttgctgatggggaaaaatacgactttccttgctttttcaaagcatataaaatgggtctgtggagtccggaaaacccgcgtcgcgtcgaggtccgcattgattgtcgtgcgcaaaaagcaaaatcgtacgtggttgcacgcaaatatgtagaacgcgaatttgaatgtctggtggaagcggccgcgaaattttttccgaaactgaaaggccgcgcgaaattcatcctgtacggcgtctctgagaccccgtacgcatcttactatggtaacatgcgcaagaaatttggcctgaaacgcggagcggagagcgattggaccgctcttggccaaaaagtcccgcgttttgataaccgtattatcgataaatgtcgcttaatccctcgcatgaatgtctgtaaaatccgcccactgaacgaagctcgcaacgaaaaggacctgctgtattatgaggtgaccctggcattgaaacttcttaacttgcgtttctttcgcaactcgaacatcgaacagctgaccttcgaggaatttaaaaaggcctttgaaatcgcgtctggcgccaaatacaaaatgactaaaacggcaatgaaaaaatttctcaaatctatcagcgccaccgcgttaggtgacgattatgcagaaatcgaaccgcctaaggagtctgggcgtgcttcgttttctcgtccagccatggatattttgaaagaactgatttttagcggaatgccgccgcgtgagttttacggccgcaaaatccctgagatctcgaacacggacaagaacaaaggggttgttgcctctgatctggactttatcaaacttatgggcgactgcccatggggcgggatttttatcccagacgtacagacctatcagtttgcgaatgcggcgttcccgaaccctgatgcacagatcaataaactgattggtagtcagaacaaccctatcgttcggcaccgtctgaccttctttttcgaacgcatcaaatttcttgaaagcaaatatggcgtgccagataaagttgtgctggagttcgtgcgtgacgattttatgggagaaaaagaaaaaaaagaaatgcgtatcgctatgaaaaaacgcgctgaagaaaaaatgatgatcgccaaggacctcgacgagcacggtttcaaaggcggcaatctgctgcttaaaatggaattgtatcgcaaacagaatggcatttgcttgtacaccggcgacgcgctgcccctttcagagctcgcgactcttgaaattgagcatattgtgccgcgttcccgcggcggtccggatgcacaatacaactatgtaattacccgtgaaaaaaccaataaattgaaaggggataaaaccccatatgaatggctgtcctcggacgccaaggagtgggcctcatataccgatcgtgtgaacgcgtgcgcgaaagctctgggcaaaaaacgttgtcgtctgttgctggagaaagacgcagaggaattagtcgagaaatacaccgcgctggcggaaacggcccatatcgctaaactggcccaaaaaatcgtctgcatgcatttcggtttccaatttggcggtttgtccggcacgaagcgcgtatttacggtccctggggccctgaccagccggattcgcaaattctacggtctcgatcgcattctgcacaacgcggcagcggaaagtgaaaatctcagctttgaagaattcttgaaatttagtgaagatctggagaagaaaaaccgcaaaaataaaaaacaccacgccctggatgcgatgtgtctgtgttttgctccaaccggggtggacagccggcgcgcgaaactgggggaaattttaccggaaaagctgcgtagtgaaaaagcagcccgcgagttcttcaagtcttaccttgataaaatcatgccggtcgatgtggctcccaaaaaaccccgtttggaggacggcatctatagtaaacgcattattgggggtaaagcctgcatggtgaagcgtaacaacttggttgatctggcttataaaagcggcctgaaaccggtgttcgacatcccgacgctgatcaaattagttgacaaaaaggaaaagggcattattaatccgcagattcgtaaaatgattggcgaatttgctgccaccaatccggacgaatcagcgtggcgtaaatggtgcgaagaggtacgtcttccgagcaaatctggcctgggtgcccgcgttttacgcgtcctggtgtactacggcgaagccgatgaatataaggatctgagtaaggatggctgtggtgcttatcggaaaggcgacggccataaaggccaggtggtgtgggaaagtgtggatggaaaatattacgttgaaccggtctatgtacacgcttcgaaagcgggagttatggcggccttgaatgcgaacccgaagaaaaaacgcatctgcggtatgtttaattcccattgcaccgttgatgtcggcgatgtgtacaacgatcgcggcgattttattcttccagccggccgctacatggtcaataccatcctgacgaccgggcggtgtgtcttgaccaacgccgacggtgaaaaacgcaacccgatcaacattaactacctgatgcgcgctggtatgcgccgcgtcgagttaagtgaactg

SEQ ID NO: 5575 - DNA, 3183 bp, synthetic construct
  misc_feature 1..3183: note = Description of Artificial Sequence: Synthetic polynucleotide
  misc_feature 1..3183: note = MG1-7 sequence codon optimized for E. coli
  source 1..3183: mol_type = other DNA
atgaaggtgatggaagacgagggtggcaatcacatctggggctttgacatcgggaaaggttcgctgggcgaagcggtgctggacggctcagaattcaaacacgtggcgagcctgctcctggacgctgactttggagaaattgagacagccgccggattacgccgtcaaatgcgcacacgcaaagcacacaaggctcgtgagaagtggcttgagtcctgtctgagcggttttggtattgaaacattgaagcgtcgtgaggtcggcatcgttaatggccagtggaccctcatttcgaaaggggatgagcgcctggaacgtgagtttccaccagatggtgagaacatttgttacaacagtattgctctccgctgcaagttgttactgggcgaaaagctggaagggtggcaaatctttaaagcactcaacagcgcgatccagaatcgtggctatgatgagaacatcccgtggaaggaaagcgatgctagtccgtcgaagaaagaaggcggggactatgcgcagaaactgtcacaatactctcgtgaaaagtccgagcttttcgaatctttcgagggtggtgagaagtatgattacccctgtttctttaaagcgtataaaatgggcctgtggagccctgacaacccagaacgtgttgaagtccgtattggatccgatgcacagaaagcaaaagattacgttatcccgcgtaaggatgttgagcgcgaattcgagcgcctggtggaagccgcctcgaagtggtaccctgccatgaagggcaaagcgatgtacatcatgtatggtatcgccgagaccccatatgctagctacaagcccctgctgcgtaagaaattcgatttgaagcgtggggcagagtctgattggaccgctctgggtcagaagattccacgcttcgataaccgcatcattgataagtgtcgtcttatccctcgtcttaatgtgtgtaaaattcgcccactgtccaagattcgcggggaagccgacctgttacactatgaaatcacattatcgctgaagctcctgaacctgcgtttctttcgcaactcgaacgtggagtcactgagcttcggagagtttaaagcagcattcgagattgccaagggagccaagtataaaatgggaaaagccgccttaaagaaattcctgaagagcatctccgccagtgtcttatctgaagatcaatctgagattgaggcgccacgtgaatcgggtcgtgcagccttcagccgtccggcgatgctgctgctgaaggaactgattttctctggtatgaccccagcggaattctatgcaaagaaaagcggagagatcagcaacgcggaccctaataaaggaatcgtagcctcagacttagacttcatcaaactcatgggtaactgtggctggagtggcatcttcatccctgatgtagatacatttcacttcgccaataagggagcagaaccagcgaagttgatcaatgaactgattggcagccaaaataacccaattgttcgtcatcgcctgagcttcttttatgaacgtattaaattcctggagagtaagtttggcatcccggataaagtagtattagaattcgttcgtgaggattttatgggtaaggaacagaagaagcgtatgcagattgagatgaagaaacgtgcttctgaaaagatgttgatcgccaagaaattagatgaagccggctataaaggtgggaaccttcttctcaagatggaactgttggagaagcaaggcggtgtctgtttgtacacgggtgaaccgcttttgccttccgaactcggtgtgctggagattgaacacattgtaccacgttctcgcggcgggcctgatgctcagtataattacgtccttacacgtgaaaagacgaataaagagaaagcagatcgcactccattcgagtggctgtcttcagacccggtcaagtgggctggttacagcgatcgtgtgaaagcccgtgctggtcaactggggcgcaaacgttgtgagctgttgttagagaagaatgcggaagagttggtagagaagtacactgccttagctgaaactgcccacatctcgaagctggctcagaagattgtgtgtcttcactttgggtttcagtttggcggcctgagtggcacaaaacgtgtctttacggtccctggagcattaactgcacgcatccgtacgttttatggcctgaacaagatcttacataatgaagacttggcccacgaaacactgagcttcgagggcttcctgaaacgtggtgaagagttagataagaagaatcgcgcaaacaagaagcatcacgccttggatgctatgtgtttgtgcttcgctcctacaggggtaaatagcaaacgtgcccgtgtggacatgctcctgccaccaaagatccgtagcgagaaagaagcggaacttttctttcgtaaatacttagataaactcatcccagtggatgtcgcaccaaagaaacccaagctggaagatggtatttactccatgcgtacagttggtgggaagaaaatcatggcccgccgtgtaaacctggttgacctggcatacaagagcggcctgaagccggtgtacgacgtatcggtcctgatcaaacttcttgataagaaagagcgcggcatcattaatcctcagatccgtaaactggtagcagactttgcccgtaccaacccaagcgaagatgagtggaagaaatggtgtggtgagtgccgtttacctagcaagaatggtctgggcacccgtgtaattcgcgtgctgctgaactatggtgagccggcggagtataaagacctgagcaaggatggccgtggtgcatttcgccgcggtgatggtcacaagggccaaattgtgtgggagtccaccgatggcaagtactgtgttctcccaatctatgtgcatgcaagcaaggccaaattattagcagaactctgtgcaaacccgaagaagaagcgcatttgtggtattttcaccagtcattgcatggtcaaggtgggtaacacctacaacaataaaggtgagttactgctgccggaaggagtttacatgcttaacaccattcgtacggatggatggatccagctgacgtctgccaatggtgacaagtcaaaaccaattaatattaactacctcatgaaggcgggtatgaagaaggtccctgtgaaggattta

SEQ ID NO: 5576 - DNA, 3999 bp, synthetic construct
  misc_feature 1..3999: note = Description of Artificial Sequence: Synthetic polynucleotide
  misc_feature 1..3999: note = MG2-1 sequence codon optimized for E. coli
  source 1..3999: mol_type = other DNA
atgccaaccaccaacccctatgtaatcacacacgtgacgaagaattggatgaaggatgagttttacgattcagctcttgtcctcggtttggatattggaattgaaggcatcggcgtttggttgcggaaaggccgcgaaccgctttttgcccgtacattcatggtttcgctcccggaagcggctccgctgaagaatcggcgcgccaaacgagcacaacgacacgcccggcagagcctccgtcgtcgtgaggccatgttgcgcgagtgggttgttcgctacggcttgcttccccaggaaaaaactgacggacggtggtggaagaaccctgccgtttttgagcgggccttcgagcatcgtcatcgagcgattaccaccggggtagccagtcctgaatgtttagtcgtatgcatccgtcacctcttgcggcatcgcggttttgattatcacctgaccgacgagggggctttcccgtggggtgatgaattggatgataaggaaatcatccagtgggccaagaactcgtgttgcgcaccggagtatcgcactcatttgtgcaatttgatcgaggccgacgctgcttgggcgaaaaactccgatggctcatttacggaaaagtatctcaaagtgcgacaggcactggatgatgccgtgagggaatacgagaaccgaccggtcgagcggatgttggaacagcatatgagcgagaagaatcatccgcatctgcggcctcgcgcccgtggacgcaatttcgcccgtgagcttgttaagcagcacttatatgccatttgcgagaaacatcgccacttttttgcgcccggcactttcgaccaagcgatgcgggaattgctgggtgaccagacaggaccaagtcagtggaaactgacgtggatggatcaagacggcaaggcccgacaaacgatcctcgattatcaccggcgcacacgggaagaggccgaagagctttggaagcgcaaagtcaaaaaatgcccgtttgctccattgctgtttgaaaagcggcatccgacgactccacaacacgactgcgctgtccgtagcgacccacgaatccgtcgtttcaacctactgatgttcttagctgaacgacggatcgaactggagacccacgacgcggaaggacgactccaaaatccgcgcgtgaatcttgatgccaacgtcgtccgcgatttgttgggcgatttggagcaagatattcgggcggtcgaagccttgcgaaacaagcagtcagcgtcccgaccagacaaaccggggaagaagacctttgaacagcgatggcgcatctgtaacgactgcggcaaggagactggacaagatgagacgggcaagagttcctgttgcaaagctaagacaaaacccaaaatgccgctcgctggggtcgctaaggggtcgttcaatgctgactttttcgatcagttgggtgacttgttgcgacccgaattgcgttccttgaagggacgggcgagcctgtccggcgaggcggcggaagtgctgttcaagctcgttaccagaaacggtacagacttcgagcctgctagaattcgccaagcgttggaagactgcggctactacgattggcgtaccaatctgccggccggccttggcatctatccgcaagtgacgttcttgttaggaaatcgcggtcattacgacaaggacggcaaccccaggcagatcgacaagacgacaggcaaccccgtacatcacggcatcctgcgccggctgtttgcgggccagttgcgtctcgacgatgggacattggtgggtctgaaggataaactcgacgataaggttgtgcccgattacgtggtcatcgaaaccattggcgagattccgaaaaaccagaaggaaaagaaggagtttcaagacgaaatcaaagccaaccggtcacgaaaaaccgacatcatcgagaagaaatacggtctgaaactcgattcgctttctgactggcaggtgaaacaagtgttgctgttcgaccagcaagccaatgaggaaggcgaagcgttcagcccctacagcggcgtgtccctcggcacaaacccgctggcgcatgatttggaggtggagcacatctaccccgaacgacgcggcggtatcagcgtcatggacaatttggttatcacatggcgcacagaaaaccaaaccaagggagaccgaactccttgggagtgggcaaaagacgagggttggcgggtggacgtccatttgcagaagatgcactggagtgcgaacaagcgcgctctatttgtccgccaagaaagcgatccgccgcagtgggacaacaccacacggatggcccaacttgctcggcatctccgcgccgaggtcatccactggcttggtttagaccagatccaagatcaaaaggagcgtaacaaggaaatcgcccgccgcatcgggacgccgaccggcttccaaaccagcgtttgccgcgagtcgtggacaccaccccatgtgtttccccaaatgtatcggttgctctgcgacaagaagggagtcccggtgcgcgacaggaatggacaagagcgatgggtcaaagaccgcaccaatttgcgacatcacctctgggatgccgctgtgctttcgcatattccaccaggtgtggggctgaattccgccgattgcggcggcattttcgtccaccgtcgcgacccgcagaatggcgaatggtcggtttcggcgttagcggatcttggccctgacctggtggcgtttgaaaaggccaatgccgaccgttgtttagtggtgcgcctgcgccaacgcaaatccaaaaagtcccgttacaaagaaaccatcttcagcctgccggatcaacagaacagggtctttgcacgcgaaccattgagcaaggtcgtcacatctctcttaaagagcaagaagaagaacccggatgcagaattgcggaagctattggaccggccggggcttctcaaccccctcgaaatcacaaacaaaaagacaggccaaacgaaacaaatcaagttgctgaacaaggccgacgtagaacgttggttatcctgcaaagacgtctcactggatcaagaaggattccgcaaattcatcgaggatgtgggcgtgccgacggagcaaatcccagacgacgcggtgaaagcggcgttcatgaagagaaatggcgagacgttacttcgcaagacgttcaagcccaactcccttgtaagttttattcgacagaaatgtcgcatcaaagattcagaaatcgaggcccgtgtggaaatagctatcgccgaacgaaatgaacgcaccgtcctgcgggcggctaacggacgagacggacagcccggtcaagtcatccgcagcattcttatcgagcaagacaagttgccgccatgcggttttggcctacatttcaatcccactgccaaacccaaacgcgggagcgaagtcgctgggttcaagcctgtggacaatagtaattccgttgtctatctgcgccgcgaaatctggatcggccaacgcaccaaaaagaaaggcagaaaaacaaccgtggagaccttctacaagtcgcgcctcatcccacatccacgtcacctcgcttcgtaccagaaacttcacggccagccgtggaaagccgacccgttaccgctaggaatgaaactggccggcaagctggccgttggtgacctgctccgtattccgttgaaaaaagaaaaacgaaatcgcaacgacaatttgatcgcgaagcgcggtgaaaccccgctggagtcgaggttctaccgggtcaagtcaatgaagaccaacggcacgatcgaattccaaatggccgagtttgctgaaccaaagttggtaaaagggcaaatccccgatccggccacggaacggttattggaaacctacgagttgacgtgcagcaacgaggccgatttgctctggttgctggaagtcacgacaggcaagagaatcaaacttccaccgccggtcgtggaaaacgctccgaccactgggaaacgggagggcgaacttctg

SEQ ID NO: 5577 - DNA, 3240 bp, synthetic construct
  misc_feature 1..3240: note = Description of Artificial Sequence: Synthetic polynucleotide
  misc_feature 1..3240: note = MG2-7 sequence codon optimized for E. coli
  source 1..3240: mol_type = other DNA
atgaagcaaggtcagattgcgttcagttttgacattgggcattcatcaatcggttgggcagcgttccaagtgagtgatgcaccgggtacctttcacagtctgctgggtaccggggtagtgttattccctaaagacgcatgtttggccagcgcacgtcgtgggtttcgtcgtagtcgtcgtaatattgcggcacgtcgtagccgcatcgatcgtcttaagaattatctcgcaggccttggtgttctgtcgcgtgatcaattggacgcgaatagcaattcctacccatggttgttggcggctcgcatccttgcgtcggacggtaagaaaaccttaacctgggaagagctgtggagcgtactgcgttggtacgcacataatcgtggatacgatggtaacgcactgtgggccggagacgatgccgacgcgggagacaaggaagatactgacaaagtaaagaatagcattgcacttatggagaagcataagacggcaacaatggctgagacggtgtgtaaagcgttaggccttgatcccatgggagaggttaaagcatctcgtatttactttaaaggtaataacgcagcgtttccacgtggtgttgtaactgaagaggttcgtcgtatccttgcggcacacgctggtaagctcccgaaagttgacgacgcactgtccgacatcttactgcgtaacgcggctacaagtggactggaacttccggcgcgcttcaagggtggtttgcttttcggtcagtatgtgcctcgcttcgataatcgtattatcccggcatgtcgtattaccggcaagaatacgccattaaagcgttgtccagaatatctcctttatcgttggggtcgtcttttaaataatctcactgtctttggtgccgatggtcaaattcgtactttattaccggcggaacgtcaggcgctgcatagccgtatggaagcggatgggttctttacaaagcgtacgttgaacgcggctttaaaggatgttaccggctgcacaccagcgaacacggagtccttcttcttaaccgaggagatggaagaagccttagtgttagatccggtgaagaagcttttggccactaatcaaattatgaaagacctgtggccgcagttatcggcagagtctcgtgagaaagctcagagtagtttaagcgctggtaagaaaattcgcttgggtgacatccttgctgagatggagaccgcaggccaagatactacggcggcgtcggatgcgcttgcgtcgcatcaaaagaaggctaagaagaagaatgcggacctggcgactcgtcgtctgagcgcggactacccgaagggccgcgcggcatattgtcgcgagattctggcgaaaacgtttgatgagtccattagcggaaaggattcgaccaaagagggcgggtgtttatatgagacggaagagattcgtaatcgtctcctgcgcgagcctctcgtgcaacaaacaaacaatcatctggttcgccaccgcctgttggtctttgagcgtctgctggcacatatggtagaagaattcgcgggtggagatgagaagcgtatcgcggctactgttgttgaggtagtccgtgagttgcaagagtttagcggtttaaatagcaaggagattacccacaagttaaacgagaagctcggtaactttcgctctgtggtaaagaatctcgaagaggctatcgcaaatagtgaagagcgcgtggcaatcactggatcactcattcgtaaggcgcgtattctcgaagatcaaggattcgtgtgtccgtacaccgggacccacttaagttataatcacttgcttgccgatcgtctggagattgaacatattatcccgcgttcgttgcgcccgtcggatgctcttagcagttgtgttatgacgtttcgtagcgtaaacgatatgaaaggtcaacgtacggctatgcagtttatttgtgaggaacaaggccgtgaagtgcctggtcatgagaatattcagattaccacgaagaaagcgtatgttgactacgtagcgaaacataagaagcagtatccacagaagagtgatgaccgtcgtcgttgtgagcgtcgcgccgagttgatgttaatggaacgttacgatcaacgtaatgcggattttacagaacgtgatcttacacagactagccatctcaataagatggctattcgtcttgtgaagcaacgtattgggattgatgcgaagcatttaccgggtaatgtgacggcatttattcgtcagaagctgcacatcgatgagtgtttatttaacgcggtgccgcgcttacagacggcggcaaaaggtcagccaaaatccagtaagcgcaagaagaaggcagaagaggctccggtggaacctattcaggatgatatgccgccgcgtaaattaacgaaagcggatattcgtgaattgacttatctccaccatgcgatggacgcagtgacgcagggattagctttgttattatttgcaccggaagattggccgctcttggtaaagcgtaatcttccggacagcgagcagcgtcatctgaaggcccgctacccattcttggacttttcggcagacaaacatattagtattcaggatttaccggaagatactctgcatactatttcggaacgtcttgctgagtgtcgcgtggttcgtcatatcccggcgaagatgcatggtattattgttgatcaaacaacgtggggcacggttgcggctggggctattaccaccctgcgccaaaagactactgaaaagaatgcgcgctgtgacgagaatggtaaacgctttattaaaactacagagaagaagcgtagtctgctgctgggcggtcctgatgcgccagatggcaaacttgcaaagatcaagggtgccattttagttaccgagaattggggttgtgcgctggatccgagcccgacggtaattccgcactttaaagtctaccctcaactgcgtgcattgcgtgaaaagaatggtggtcgtccgattcgcattttacgtaagggctcattaatccaagtgaaagccggcacgtaccagggtatttggagcgttgcaagtattaaagacaacgcagacggtatctgtctggacattaacgccgccgataaagtgaagttagaaaaccgttcagacgacagcaagattaacgttcgcctcgatagcctgcgcaagtctggcctcaaaatcttgaagcccaaactcacaggcgcctgcccgacgacaagcagcccg

SEQ ID NO: 5578 - DNA, 3402 bp, synthetic construct
  misc_feature 1..3402: note = Description of Artificial Sequence: Synthetic polynucleotide
  misc_feature 1..3402: note = MG3-2 sequence codon optimized for E. coli
  source 1..3402: mol_type = other DNA
atgtgcattaacggtgactcgatggccgcagttagcggctttagcccgtgcaagttcgggatcgggatcgacgtgggtgatcgttcggtgggttttgcgactatcgaattcgacgacgacggttttccgctctcggtcttagccagcgtcagttacaaacacgatggcggcctggatcctacgaagaataagaacccgattagccgcaaggcgactgcaggtgttgcgcaccgcgtgcgtcgcatgcgtaaacgccgtcgtcgccgcctggaaatgctggatgtgaagttacgctctctgggcttccctgtcccgaatggcgaggagccgcaaacttaccaagcatggcaaagtcgtgcaaaattaatcgatggccgcgtggacgaagtacgtgaactgaacgaccacctggtacgtgccgtgcgtcacatcgcgcgccatcgtggctggcgtaacccttggtggcgttttccgcaactgcttgaggcctcagaaaaccccagcgacgcgctggtagcgatgcgtcgtgaagcggctcaacgctggccaggccaggcgttagaaagcgccacaatcggtcagctgggttggcttggtgcacacccggatgttttggttcgcccgcgctcggcacgttcggaagttcccgtacttagctcccgtgtcatgcaacaggatcagtgtgcagaaatccgtcgctactggcaactgcaggatctccctcaggaagccctgcatcctatcctgaaagcggtctttcatcaggaaccgccgacggtacctgcggaacgtatcggccgcgacgccttaccggggcaagatgcaccgcgtgcgattcgcgcagcacttgaattccaagaatatcgtattcgtgacgcggtggccaacttgcgtgttcgcaccggcggcgcaaaccgcaaacgcaaactgactccggaagagaaccatgcggtagttaaatacctgatggaatttcgccaaaatccaagcccgtcttgggccgaggtagccgaacatattgacatcgcaccgactagcctgatcgcacctatcattgacgatatgcgcatcgcagcagctccaaccgaccgtagcaccatcaccgccgaagcggtactcagcaatatgaagaaagactcgggcgcccgtttatggtgggaatctgccgaccagaaaatgcgcagcttgttaatccgcttcctggccgacacgtccgactatactcaaccagaggcagagatggcaggtctggtagacatcgtgagcacctggccggattccgaaattgaaaagctgagtagtgcatcatggcaatcgggacgtgccgcgtattccttgcaaagcctggaacgtatgaatgcgtacatggcggagtacagcacgggagcgcacgaagcccgcaagggtgtgttcggagtagatgatagttggaaacccgaggcggatccttgggacgcccagaccgggcagcccgtggtggatcgtgtaatgacgatcgtacgccgcttcgtaggtgcgtgcgagcgtaaatggggcgaaccggagcgtattgtaattgagcacgtacgcacgggtttaatgggtcctgcccagcgtgcagaagtactgcgcgaaatggcaagcgggcgccgtaagaacgatcgcatccgccaagagcttcgtacctcaggtatcgatgagccaaatttgtcggacgttaaacgtcaccgcaagatccaaatgcagggcggcgtgtgtttgtactgtggaaccgacatcacaagcgccactgcggaactggatcacattgtcccgcgcgcgggcggcggaaactcgacgtctaccaatttagtagcagtttgtcgtgtatgcaatgctgcaaagggccgccgcacctttcccgaattcgcaagcagcgacacccgcgacgccgtatcgcttgaagcggcggtagagcgtgtgaaactgtggatcgacgataaaggtattaagaatattggcgaatcacgttatgctcgcgatgtcatccgtcgtctgaaacagtcgacacaagatgaacctatcgatgaacgttcacttagtgcgactgccttcgctgcggttgaaattcgtcgcaaattagaaaaccactttaaagaccgtacaaagccggtgcgtgtggatgtttaccgcggcgcccttacgcgtgaatcgcgccgtgcaggccgcattgacgcgaagatccgtttgcgtggcaacatcgacaaagatcgcctggatatccgccatcatgcgattgacgcggcagttctgacattactggatccatccgtcgcaaagaccctggctatgcgtttagacctgaaacgcgaacagcaggacagcggtcgtgacacgcgttggaaggagtttaagggcttaacaccagcgagccaagaacgttttatcaaatggtgccaagcctcggagtgccttgctgacatgttacgccaacaaatcgaggccgatcgcgttccggtcgtcgtgccattacgtattagcccgagtaatggtgcggtacacgatgattcggtgcgtcccttgacgcgccaaaagattgactcgacttgggaccgtaaatcaatcaaccgcattgttgatccggagattcatgtcgcgatgcgccgcttgcttaacaatgggaccagtctgcccgaggacaagaaccgcgttttggacttacctgacggcaacgagcttggtccgcatgacgaagtcgaacttttcagtacttccgccgcctcaattaagttacgtcgcggcggaagtgcggaaattggcggtagcattcaccacgcccgtgtgtacgcgtggatgggtgctaaaggccaacttgagtatggcatgatgcgtgttttcggtgccgaattccccacgctgactaaattatccggatcaaaagatattctgcgtatgcccatccacgccggtagtatgtcatatcgtgacatgcaagaccgtgtccgcaaacctatcgagagcgatatcgctgtcgagttgggctggattacgcagggtgacgaattggaaattttacctgaagcacacctggaaaccgccggtggcctgggtgactttctcaaaagtttcccggaaacccaatggaccatcgatggcttcaacgacccgagccgtctgcgcgtacgcccgcgtctcatgagtctcgagggacgcgatacaattgatgcgatgggccatctgagtgatacggaaaagctgaaaattaaacaagctctgagcaagggccttatggtgtcagcaagtgagttgttatcgcatggtgctaagattatccgtcgcgatcaccttggccgtccacgttggcgcggtaacgcgcgtccggtcagcattgaattagagcaggtggccaatcaattagtaaaccatcgtagcgtcgacggccaa

SEQ ID NO: 5579 - DNA, 3396 bp, synthetic construct
  misc_feature 1..3396: note = Description of Artificial Sequence: Synthetic polynucleotide
  misc_feature 1..3396: note = MG3-3 sequence codon optimized for E. coli
  source 1..3396: mol_type = other DNA
atgtcagccgactcattgaactatcgcatcggcgtagatgtcggtgatcgttcagtgggtctggcggcaatcgagttagacgacgatggcttccccttaaagaagctcgcgatggtgacgtttcgtcacgacggtggcaaagacccggccacgggcaaaaccccgaaatcccgcaaggagaccgccggagtcgcacgccgcacgatgcgcatgcgccgtcgcaagaagaagcgcctgaaggatcttgacaagaaattgcgtgacttaggttacttcgtccctcgcgacgaggaaccgcaaacctacgaagcgtggtcatctcgtgcccgcctcgccgagtcccgcttcgaggatccgcacgaacgcggagagcatttagtgcgcgctgtacgtcacatggcgcgccaccgcggttggcgcaatccgtggtggtctttctcccagctcgaggaagcttctcaggagccttccgagacatttggacgtattttagaacgcgctcaacatgaatggggcgagcgcgtctcagacaacgcaaccctgggtatgttgggcgcgctggccgcaaataacaacattctgcttcgcccgcgtcgttacgaacacaacccgaagacgggcaagaacgcggagaagctgaacgtacgcggacaagagccaatcttattggacaaagtccgccaagaggatgtgctcgctgaactgcgccgcatttgcaaagtgcaaggcatcgaggatcagtacccggagctggcccatgccgttttcacccaggtgcgcccatacgtcccgaccgagcgcgtgggcaaggatcctctccagccaatgaaaatccgtgccagccgtgcaagcctggagtttcaggagtttcgcatccgcgacgccgttgcgaacctgcgcatccgtgtaggcggtagcgagcgccgtccgctcaccgaggaagagtacgaccgcgcggtcgattatctgatggaatattcggacacaacacccccgacctggggcgaggtggccgatgagctcgagattgctgagaatacattaattgcgccggttattgacgacgtccgcctcaatgtggcgccgtacgaccgcagtagtgccatcgtagaagccaagctgaagcgtaaaacgcaggcgcgtcagtggtgggacgatgacgctaacctggacctgcgcagtcaattaattttattagttagcgacgcaaccgacgacacggcgcgcgttgcggaaaacagcgggctccttgaagtattcgagtcgtggagcgatgaggagaaacaaacgctgcaggacctgaagttcgacagcgggcgtgcagcgtattccattgacaccttgaataaactgaacgcgtacatgcacgagcaccgcgttggactccacgaggcacgccaaaacgtctttggcgtctctgacacttggcgtcccccgcgcgaccgcctggatgagcccaccggccaacccacagttgaccgtgttctgacgattgtgcgccgtttcattttggattgcgagcgcgcctggggccgcccccagaaaatcgtagtcgaacacgcacgcacggggttaatgggcccgtcgcaacgcgccgacgtgctgaaagagatcgcgcgcaatcgcaacgcaaacgaacgcatccgtcaggaacttcgcgaaggtggcatcgaagcaccaaaccgcgcagacatccgccgcaattccatcatccaagaccaggagagccagtgtctgtattgcggcaaggagatcggggtgctcaccgcagaactggatcatatcgtcccccgtgcaggcggcggtagtagcaaacgcgagaatctggcggcggtctgccgcgcgtgtaacgcctcgaaaggctcccgccctttcgcagtttgggccggaccagcccgtctggagcgcacaatccaacgtttgcgtgagttgcaggccttcaaaaccaagtcaaagaaacgcacacttaacgcaatcatccgccgcctgaaacaacgcgaagaggacgaaccaatcgacgaacgttcactcgcgtccactagttacgctgccaccagcatccgcgaacgcctggagcaacacttcaatgacgacttgcctgacggtttcgcgccagtggccgtagatgtatatggcggcagcctgacgcgcgaaagccgtcgcgcaggcggaatcgacaagtccatcatgttgcgcggtcaatcggacaagaaccgtttcgacgtccgtcatcatgccatcgacgccgcggtcatgaccctgctgaatccgtccgttgcagtcacccttgagcagcgccgcatgttgaagcaagaaaacgactactcgagcccgcgtggccaacacgataacggctggcgcgacttcatcggccgcggcgaggcgagccaaagcaagttcttgcactggaagaagaccgccgttgtgctggccgatttaatttctgaggccattgagcaggacacaatccctgtcgtaaatccactgcgtttacgcccgcaaaacggctctgtacacaaagatactgtcgaagcggttttggaacgtaccgtgggcgactcgtggacagacaaacaagtaagccgcatcgtggaccctaacacgtacattgcgtttctgtcgctgctgggacgtaagaaggaattggacgcggatcaccaacgtctggtgagcgtgtcagccggtgttaaactcctcgccgatgaacgcgttcaaatcttccccgaggaagcggcatctatcctcacgccccgcggagtagtgaaaatcggggatagcattcatcacgcccgcctgtacggctggaagaatcaacgtggcgacatccaggttggcatgttgcgcgttttcggtgcggaatttccttggttcatgcgcgaaagtggagttaaagatattctgcgtgtccctatcccgcagggcagccaatcgtaccgcgatctcgccgccacgactcgcaagttcatcgaaaatggccaagccactgaattcggttggatcacgcagaatgacgaaatcgaaatcagtgccgaggagtacctggccactgataaaggggacatcttaagcgacttcttaggcattctgccggagattcgttggaaagtcacgggcattgaggacaaccgtcgcatccgccttcgcccgctgctgttgtcatctgaggcaatccctaacatgcttaatggccgccttttaacgcaggaagaacatgacctgattgcgctggtgatcaacaagggagttcgcgttgtagtgtcaacttttctggccctgccttcaactaagattattcgtcgtaataacctgggaatcccgcgctggcgtggcaacggccatttaccaacctcgctcgacatccaacgtgcggcaacccaagcattagagggtcgtgac

SEQ ID NO: 5580 - DNA, 3402 bp, synthetic construct
  misc_feature 1..3402: note = Description of Artificial Sequence: Synthetic polynucleotide
  misc_feature 1..3402: note = MG3-4 sequence codon optimized for E. coli
  source 1..3402: mol_type = other DNA
atgagcactgacccaaagaattaccgcattggcgtggacgtgggcgatcgttcggtcggactggcggccattgagttcgacgacgccggctttccgattcaaaagctggcacttgttacgtttcgtcacgatggcgggctggatcctaccaagaacaaaacgccggtaagtcgcaagaagacgcgtggcgacgcccgccgcactatgcgtatgaatcgccgtcgcaaacaacgccttcgtgatctggacatgatgttgaccaacttagggtatacagtacccgagggaccggaaccggaaacatacgaagcctggaccagtcgcgctcttcttgcatcgatcaaattagccaatgtggacgaattaaacgaacatctcgtccgtgcggtacgtcacatggcccgccatcgcggctgggccaacccttggtggtcgatcgaccgtttagagaatgcgtcccgcgagcctagcgaaacgttcgaaatcatcttggcgcgcgcccgcgaacttttcggagaaaaggtaccagcagaccctaccctggggatgttaggcgccctggcggcgaacaacgaagtcctgctccgccctcgtgacggcaagaagaagaaaaccggctacgttcgcggcacgccgttattagttgccaaagttcgccaagaagatcaactcgcagaactgcgccgtatctgcgaaatccaaggcatcgagggacaatacgatgcgttgcgttcggcgatcttcactcacaaaatggcgtacgtgccaaccgaacgcgtgggcaaagacccgctcaaccccagcaagaatcgtaccatccgtgccagcttggaatttcaagaatttcgtatcttagacagcgtagcaaaccttcgcgtccgcacggactcacgcagtaaacgcgaactgacggaagcagaatatgacgttgcggtggaattcttaatgtcctatacggcgaacgaacaaccttcatgggcggacgtggccgaagttatcggggtcccggggaatcgcttaatcgccccagtgttagaagatgtgcaacaaaagactgctccgtttgatcgcagctccgcggcgtttgaaaaggcaatgggcaagaaaacagaagcccgccaatggtgggagagcaccgacgatgaccaactgcgcagcttgtttattagtttcctcgtggacgcgaccgacgacaccgaggaagcggccgctgaggcgggcttacctgagctttacatgagttggccagcggaagagcgtgaggttctgagtgacatcgacttcgagaaaggccgcgtggcctactcccaagaaacgttgtcgaaattatcggaatatatgcacgaatatcgtgtgggcttacacgaggcacgcaaagcagttttcggagtagatgacacatggcgcccgcccctggacaaactcgacgaacaaacaggacaacctaccgtggatcgcgtcctcaccatcttacgtcgcttcgtcctggattgcgaacgccaatggggccgcccacgtgccattacggtcgaacacgcgcgcacaggactggttggaccggcacaacgccaagaaatcctgaacgagcaaaagaagaatcgcgaaaacaacgaactgattcgtggcgatctccgcaaaagcggcgtcgagaacccaagccgtgccgaggtacgccgccacctgatcgttcaagaacaagaaagccaatgcctgtattgtggggccgttattcgcaccgacacctctgaacttgaccacatcgtcccccgcgcgggcggtggcagtagtcgccgcgaaaacatggcagcagtatgtcactactgcaactctaagaagaaacgcaccttgttttacgactgggccgggccggtcaaactgcaagaaacagtggatcgcgtccgtcaattagaagcgttcaaagactccaagaaagcaaagatgtttaagaaccaaatccgccgcctcaaacaaaccgaagcagacgtacccatcgacgaacgcagcttggcgagcaccagttacgctgcggttgcagtccgcgaacgcctggaacaacatttcaacgaaggcctggccccagacgacaaatcacgcgttgttctcgatgtgtacgcgggcgcggttacccgtgaaagtcgccgtgcaggcggcattgacgaacgcatcctgcttcgtggggaacgcgacaagaatcgcttcgacgtccgtcatcacgctatcgacgcggcggtaatgacgctgttgaaccgctcagtggcgctgacccttgaacaacgctcccaattacgccgcgctttctacgaacttgaacttgacaagctcgatcgcgaccaactcaaacccggtgaggactggcgcaatttcacgggattgtatgaagcctcacaaaacaaatttagcgaatggaagaaggcggcaaccgtgttaggggacttattagcagaggccatcgaagacgacgcgatcgcagttgtttctccgttgcgcttacgcccccaaaacggtagcgtccatgacgataccatcaacgcagtcaagaaattaaccctgggctcagcgtggccggcggacgcggttaaacgcatcgtagacccagaaatctatctcgccatgaaagatgttcttggcaagctgaaagaattgccggaagactcagcacgtagtttagaactttctgacggtcgttatatcgaagcggacgacgaagtgttgttctttccaaagaaagccgccagcatcctgaccccgcgcggtgccgcggaaatcggcaacagtatccaccacgcccgtctttacagctggcttactaagaaaggagagttgaaatttggcatgctgcgcgtttacggggctgaatttccttggttgatgcgcgagagtggcagtcgcgacgtgcttcacatgccgatccaccctgggagccaaagttttcgtggtatgcaagacggggttcgtaaagctgtggaatcgggtgaggccgtcgaattcggttggatcacccaagacgacgaactcgaattcgacccagaggattatatcgcccatggcggcgacgacgaacttaaccgcttactgcgcgtcatgccagaacgtcgctggcgcgttgacggattttacaacgcaggcacactgcgcatccgtcctgccctgcttagtgcagaacaactgcccagcgaactgcaaaagaaagtggccgacaaaacactgtcagatgtggaactgatcctgctgcgtgcggtgcaacgtggactgttcgtggccatttcaagtttcctgccattagaaagcttgaaagtaatccgtcgtaacaatcttggctttccgcgctggcgcggcaatggaaacttgccaaccagctttgaagtgcgcagcagcgcacttcgtgcgttgggcgttgagggg

SEQ ID NO: 5581 - DNA, 3009 bp, synthetic construct
  misc_feature 1..3009: note = Description of Artificial Sequence: Synthetic polynucleotide
  misc_feature 1..3009: note = MG14-1 sequence codon optimized for E. coli
  source 1..3009: mol_type = other DNA
atggaaattacaattaaccgtgagatcggcaaattaggcttgcctcgccacctggttctgggtatggacccgggcatcgcctcatgtgggtttgccctgattgatacggctaaccacgagattctcgaccttggagtgcgcctcttcgattcgccgacccacccgaagaccggacagtctctggcagtcatccgtcgtggatttcgttcgacacgccgtaatatcgatcgcactcaagcccgtctgaaacattgcctgcaggttctgaaagcctacgggctgattccgcaggatgctacgaaggaatattttcatacaactaagggtgataaacaacctttgaaactgcgtgtagacggactggatcgtcttttgaatgaccgtgaatgggccctcgttctgtatagcctgtgtaaacgtcgcgggtatattccacatggcgaggggaaccaagacaagtcgtctgagggtggtaaagtgttgtcggcgctggccgctaataaagaggcgatcgccgaaacatcctgtcgtacggtgggtgagtggctggcccaacaaccgcagtcccgtaaccgcggtggaaactatgataaatacgttacccatgcacaactgattgaggagacccacattctgttcgacgcgcagcgttcattcggatctaagtatgcgtcccctgagttcgaagcagcctacattgaagtgtgtgactgggaacgcagccgtaaggattttgatcgtcgtacttatgatctggtaggtcattgtagctactttccgaccgagaagcgtgcagcgcgttgtaccctgacttccgagcttgtgagcgcttacggtgcgctgggtaatattactattattcatgagaatggcacatcacgtgctttatcggcgaccgaacgtgacgagtgtatcgcgattttattttcttgtgaaccgatccgcgggaataaggactgcgcggtaaagtttggtgcactgcgcaaggccctggatctgtcaagtggagactatttcaaaggcgtgccggcggcggatgagaagacccgtgaagtatataaaccgaaagggtggcgtgtcttacgtaacacacttaacgccgcgaatccgatcctgttacaacgccttcgtgacgatcgtgaccttgcggacgcggtaatggaagcagttgcgtactctagcgcactgccggtcttgcaggaacaattgcaaggactgccccttagcgaggcagaaattgaagcactgtgtcgcttaccgtacagcagcaaggccttaaatgggtacggtaatcgcagcaagaaggctttagatatgttactggactgtctggaagaaccagaagttctgaatttaacccaagcagagaacgattgtggcctcttaggtttacgtattgccggtgcgcaattagaacgttcagaccgtttaatgccgtacgaaacgtggattgagcgcactggccgcaccaacaataacccagtggtgatccgtagcatgtcacagatgcgcaaggtagttaatgctatttgtcgtaaatggggagtaccgaatgagattcatgtggaattggaccgcgaactgcgtctgccacagcgtgcgaaggatgaaatcgcaaaagcgaacaagaagaacgaaaagaaccgtgaacgtatcgcaggccagattgcagagttacgcggatgtacagctgacgaagtgaccgggaagcaaatcgagaaatatcgtttatgggaagaacaagagtattttgacttgtatacaggtgccaagattgaggttgaccgtctgatctccgatgatacgtatacccaaattgatcatattttgccattttcgcgtactggcgagaatagtcgtaataataaggtgttagtgctggctaagtcaaaccaagacaagcgtgagcaaaccccgtatgagtggatgtctcatgatggggccccgagctgggacgcgttcgaacgccgtgtgcaagagaatcaaaagctgagtcgccgtaagaagaattttctgttggagaaggatctcgacacgaaagagggagagtttctggcgcgttcttttacggatacagcatacatgagtcgcgaggtgtgtgcctatttagcagattgcttattgtttccggacgacggtgcgaaagctcacgtcgtgccgacaaccggtcgtgctacggcgtggttacgccgtcgttggggtctgaatttcggctctaacggtgagaaggatcgttctgatgaccgccatcacgcaacagacgcgtgcgttatcgctgcctgcagcccgtcgctggttatcaagacggcgcgcattaatcaggaaactcattggagtattacgcgcggaatgaatgaaactcagcgtcgtgacgctattatgaaagccctggagagcgtgatgccgtgggagacattcgccaatgaggtccgtgccgcccatgactttgttgttcctacccgtttcgtgccacgtaaaggcaaaggtgaactctttgaacaaacagtgtaccgttacgcgggtgtgaacgcgcaaggtaaggatattgcgcgtaaagcgtcgagtgacaaagatattgtgatgggtaatgcggtagtatcagccgatgagaaaagcgtgattaaagtttccgaaatgctttgtttacgcctgtggcacgatcccgaagcgaagaaaggtcaaggggcgtggtatgccgatccagtgtacaaagcagacatcccggccttgaaagacggcacctacgtaccgcgcatcgcaaaagcacacaccggtcgcaaggcgtggaagccggttccggagagcgcaatggcgaaaccgcctttagagatttatttcggcgaccttgtacagattggtgactttattgggcgcttctctggttataatattaacaacgcgaattggtcattcaccgatcgcctgactcgccttaatttgtcatgtccgacggtgggccagctgaataatgatctgagtccggtcgtgattcgtgagagcccgattaag

SEQ ID NO: 5582 - DNA, 3246 bp, synthetic construct
  misc_feature 1..3246: note = Description of Artificial Sequence: Synthetic polynucleotide
  misc_feature 1..3246: note = MG15-1 sequence codon optimized for E. coli
  source 1..3246: mol_type = other DNA
atgaactatgtgctcggcctggacgtcggtattgcttcagtgggatgggccgtgcttgagttgaatgaagaggacaaccccattcgcattgagggtcttggtgcgcgcatcttcgataaagcggaagtgcccaaaaccggggccagtctcgccgcacctcgtcgcatgagtcgtggcatccgtcgcgtgattcgtcgtcgccgctttcgcttacaacgcgtccgctcatacctgaagaagcacaacattctccctgccgagaaggttgatcacttatacgacgttccatctgccatcgacatctacgagctccgtaagcgcgcactgactgagaaggtcacagccgaggagtgggcgcgcctgttaatcttcttcgcgaaacaccgtggtttcaagtccaaccgcaagaaggcttcgggagacgccgacgagggcgagatgctcaaggcgatcgcagcaaacgccgaaatcctgaagaactatcgtacagtgggagagatgctgtgcgacaacgagaagtttcgtaaacgtaagcgtaatcgcgatggcgcatacaactttactgtctctcgtgcgatgctgatggaagaaattcacacgctgttcgagattcaacgcaacttgggccagaagttcgcggacgagaagctggaagaggagtacgtgatcctcttcgccgctcaacgtaaattcgatgaaggacctggagaaaattcgccgtacgcggggaaccagattgagaagatgatcggttcctgcacgttagagggcaagaaagagaagcgtgctccaaaggcctcatacgcatttatggcatttaatttatggcaaaagatcaatcacttgaaagtcaatcgtcgtggtagtgaacgcttcctgaccgaagaggagcgccgccgcattgcggacctggcgtggaagaaggagaagcttacctacggttcactgcgtaaggtgctctcgttggaccccgaggatcgcttcgttggcctgcgttacgacctcaagaaaggcaaggccgagaacttagaagaacccgtttctgaggcagaaaagcgttccttttcatgggtcaaggattatcactccattcgtaaggcccttgacaaggtggagaagaatcgcattttgaagctctctcacgagcaactggacacaattgccaccgcgtttagtgtttacaagaacgaagagaccattgaaaagtacctggaagagggcggcattggtaaggccgacggtgaggcgctgcttgagcgtttgagcggatttagcaagtttggtcacctgagcctgaaggcgtgttataagctgctgccgttcctggagaagggcgaggtgtactcacgcgcttgtgagttggcggggtacgactttagtaaatcgtccttggagaacattgacgacattccgaacccggtcgtaaagcgctcgatttctcagacccttaaggtgattaacgcgatcattctgcgctacggcaacccagttgaggttcacattgagttagcacgtgagctcgcccgttcttttcgcgaccgcaagaagatggagaagggtatgcaagagaaccaagcgaagaacgagaaaattcgtcagcgcctgattagtgagttcggggtgctgcgcccaaaaggcatggacattgttaagttcaaattatgtgaggaacaaaacggggagtgtgcctactcgcaaaagcactttgacatggaaaagttacttaaggacccgagttacgccgaggttgaccacattatcccgtactcacgctcattcgacgacagttataacaacaaggtgctggttctgacgaaggagaatcgtgagaaacgtaatcgtatcccgatggagtacctcgccgacgcgcctgagcgcaagaaccgtttcattcactgggtcaaatccacaatccgcaatagtcgcaaacgtgagaatcttctgcgtaccgattacacggcgactaccgagaatgagtggaagcgccgtaacctgcaggacactcaatacatttcgaaatatttatataactacctgcgccatcacctggtccttgcgaaaggttacacagagcgtaagcgtcgcatcattccggttaacggtgctgtaaccgcatactttcgcaaacgcctgggtattaacaagattcgtgagaatggcgacctgcatcacgcggtggacgccgttattattgcgtgtgccacacagggaatcgtcaacaaagtttcccgctatagtaaatcgcgcgaactctgggactacgaggtcgacatggagacgggtgaggtgctgcagaagaagaacaagaataccaaggatgtctttccggagccgtggcttaactttcgttacgagttggagcagaaggttcgtgtgcgccccttggacattcccgagacggcagacatcacggagatggaagagccgttcgttagtcatatgcctaaccgtaagatccacggtcctgcccacaaagagactatccgctctggccgccttaaagaggaaggttacacaatcagcaagaccgctctcatcgacttaaagcttactgaggacaaggaagagattaagggctattataacaaggagtcggaccgccttttgtacgaggctttaaagaagcagctgcagcgctacggtggcaaagctaaggaagcgttcaaggagccgtttcacaagcctaaagcagatggtaccccgggcccaatcgttaacaaggtaaagatcatggagaagagcactatgttaatcccggtgaacggcgggaagggtctcgcgtcaaacggcaacatggttcgcatcgacgtctttcgcgccgaggagaaaggtaagaagaaatattacttcatcccggtttatgttgctgacactgttaaggaagagcttccgaaccgtgcggtcttggcccacaaaccatacgaagcctggaaaattatgaaggaagaaaacttcatcttctccctctacccgaacgaccttatcttcgtcgacgccggtaaggaaatcccgttcaaagccgcactgaagggtagcacccttgacccggaaaagaaagcatcgcgtttcctgatgtactacaaaggggccgacatcgctaccggtagtattagtggcgtgaaccacgacgaaacctacaaagcacgcggcgtaggtattcagtcactgcgcgagattaagaaatgttgcattgacgtgctgggcaacatcagcttcgcttccaaagagaagcgccaaacgttccgt

SEQ ID NO: 5583 - DNA, 3681 bp, synthetic construct
  misc_feature 1..3681: note = Description of Artificial Sequence: Synthetic polynucleotide
  misc_feature 1..3681: note = MG16-2 sequence codon optimized for E. coli
  source 1..3681: mol_type = other DNA
atgaagcgtatcctggggctggatctgggcacaaatagcatcggctgggctctggtggaagtggacgaggacggtaagattatcaagatccttggcatcggttcccgtatcatcccgttgagcccggatgacgcgaacgaattcacgacgggcaagagcatcacgaagaatcgcaagcgcaccgagcaacgcaccacgcgcaagtgtttcgaccgttaccagctccgccgcctgttgttaaccatcgaacttcgtaagtttaacatgctcccggacgaacgcttaattaagctgccggtcctggacctttggcagctgcgcgcaaaagccgcgacaaagggtaaccgtctgaccctgccggagctgggccgcgtcctgtaccatctgaaccagaagcgtggctacaagcacgcgaagagcgacgagtctaacgacaagaatcagcgcgagtacgtggccaacgtcaacacgcgctacgccaacattaaacaactgggtaagaccattggccagttcttcgccgagaagcttgaagagaaccaggtgattactgagaagggcaagttctacacctaccgtatcaaggaccaggtatttccccgcaaagcgtacgaagaggagttcgaccagattatggaatgtcagcgcgagttctaccccgaaattctgaccgacaagtttattgacaaggtgcgtaacgagatcatttactaccagcgtaagcttaaaagctgcaaacaccttgtgagcctttgcgagttcgagaagcgcgcgtacgtcaacaaagacggcaaggtagtgtacgacggtccaaaggtagcaccgcgcacctcgcctctcttccaggtgtgcaaaatctgggaaagcgtgaacaacttgaagattaagaaccgcaagaacgacgagctgtacattacccaagagcagcgcattgcgatgtttaatttccttaacaataacgagaaaatgacccttagcgacatgtacaagatcttgaagatcgataagagcgatggctggtggggcggaaaagcgattggtaacggcctgcaaggtaacaccacgaagatgcagttaaagaaggccctgtcgaactgccagaacgttgacgagctgcttcagttcaacttggacatcgtggactcagataagattgacgaggagaccggcgaggtgctgaaggtagtgtctcctaactgtgagcaggagccactgtacaagctgtggcacacaatctacagtatccaggacaagaacgagctgaagaacgtcttacagaagaagtggggtatcacggacgagaccaccttaaacagcctcttcgcgctggacttcgtgcgccccggctacggtaacaagtcgagtaagttcattcgcaagattctcccttacttacaagacggtctgatgtacaacgaggcgtgcgcttatatcggcgtcaaccacagtaactcgctgacgaaggcggagaacgacgcgcgtgagctgctggagaagctgccgcaaatcaagaagaatgagctgcgccagccggtcgtagagaaaatcctgaaccaaatgatcaacgtggtaaacgcgattttcgacaagtacgggaacaacaacggaatcgacgagattcgtgtggagctggcacgcgagttgaagcagagccgcgaggagcgcgagctcaccgacaagaacaaccgcaaccgtcagaaggagaacgattcgaacgcgaaactgattgaagagtacggcatccgcgcatcccgcaaccgtatccagaagtaccgtatgtggaaagaaagccgccagacctgcttttactgcggccaggtcgtggacgtgaaggacttcttgcgcggttacgacgttgaagtggagcacatcatcccgaaagctctgttcttcgacgactcgttcagcaacaaagtgtgcagttgtcgcaagtgcaacagcgaaaagggtgagcgtaccgcgtacgactacatgagctcaaagggagaggacgagctgaaccgctatatccgtacagtcgaggatcgttgcaagaagggcgaaatctcgaagacaaaacgtgagcgtctgttaacgccggccgacaagattccaacggacttcatcaatcgccagcttcgtgagacccagtacatcgcgaagaagagcgttgagatcctgaagcagatctgccgcaacgtttggaccacctctggtagtgtgacagacttcttacgtcacaactggggttatgacgaaatcttgcacactctggacttcgatcgctacaagagcggtggcctgaccgaggtaatcgaaatcgagcacaagggccagaagcaccgcattgagcgcatcaaggactggagcaagcgtctggaccaccgccaccacgcggtggacgcccttgtggttgcctgcaccaagcagagctatatccagcgcctgaataacctcaacaccgagcgcgacgccatgtaccaagacatcgaggcgcagagcgtcgagtggaaggagaagcacagcttgctcgagaaatggatcaagttacagccgcacccgacggtgagcgaagtcacagacaaggttgacgagatcttggtatccttcaaagcaggcaagcgcgtagccactctgggtaagcgcagcgtttacaagaacggcaagaaaaccgtggtgcagaacaacattatcgttccgcgcggggcactctgcgaggagtcagtatacggccagatcaaccttatcgagaagaacaagccgattaagtatttgttcgagaacccgagcctgatcttcaagccgtacatcaaggccctggtcgaggaacgcttaaaggagtacaatggagacacgtcgaaggccatcagcagtctcaagaacaatccgatttaccttcgcaaagacaaatcagtagtgcttgagtacggtacctgttataagaaggagtacgtaaagaagtactcgctgaactccattaaagctaaggacgtggacagcatcatcgataagcacatccgcgaagtggtccgtcagcgtctcgaggataacaataacaacgagaaggccgccttcgcgagcccgctgtacgcggataagcagaagcagatcccgatcaagagcgttcgctgtaccactggcatcaacatcgccgcccccgtaaactacaacgagtctaacgatccgatttctttcgtgaaaccgggcaacaaccaccacatcgccatctacaaagacaaagacggcaagcgtcaggaacacattgttaccttctggcacgcggtggagcgcaagaagtacggcatgcccgtagtcatcaccaaccccaaggagatttgggacctcatcatcgagaaaagcttggacttgccggagagtttcttaaactgcctgccgaacagcgactggaactacgagatctccatgcagcagaacgagatgttcgtgatgggcatgagcgaagacgagtttcaagacgccatccgcaataacgactacaagacccttaataagtacctgtaccgtgttcaatcggtcagtgagagcgactactggctccgtctccatatcgagaccatgaacgacaagacgcctgagggtaacatcatcaagaagtactaccgcattaagtcaattaacaccttcttcaacttcaacccgcacaaggttaaaattaccttgctgggtgagatccagagtagt

SEQ ID NO: 5584 - DNA, 4044 bp, synthetic construct
  misc_feature 1..4044: note = Description of Artificial Sequence: Synthetic polynucleotide
  misc_feature 1..4044: note = MG18-1 sequence codon optimized for E. coli
  source 1..4044: mol_type = other DNA
atggaccagagtaaagagtactacattggtctggatggtggtacggactcggtcggatgggcggtactcaacccggactataccgtcgtgaagaagcgtggtaaaagcctttggggcgtacgcttattcgagagtgggcagacggcggcggagcgtcgtttagcccgttcggcgcgtcgtcgtacggatcgcaagaagtggcgtctgaaacttttaaaggaactgttcgcggaagaggtggctgcgtgcgatcccgcgttcttcgcccgtctggcagagtcccgttactgggaagatgacaagaaagttgatggtgcggatactttattccatgacgcggacttcaccgacaaggattaccatcgtcaattcccgacgatttaccacctgcgccgtcatttaatgtgttgtactgagaaaccagacattcgtctcttgtaccttgccgttgcccatatgattaagaaccgtggtcacttcttgaatgagggccaagacttgaaccaagtccgtcgtttcgatgacgtatggcagaatctttgtgcggctgtatcggacgttttagggatcgagttagccgtcgagaatggcgcgaaggccgctgaagtattaaccagcagcgttaaaattaaggaaaagacgaaacaattggaatcagtactgggcgagggtgagtcggaagcggatcgtagtgtttgtaaagccctggctggtttacttgcgggtgcgaaagtttcagccgtagacttattcaatggtgatgaggcattgaaagaatgtggaaagttttcactggcggagaagtcgatcgaggagctcgaacccgacctgggtgacgccttgggcgaggaacgtttcagccttttacaatacgcctacgcggcttataattgggccgtgttcgctcgtctcctgccagaaggcaagacaatttctgaggttaagacagaagagtatgaggcgtataaagcggaccttcgcgcattaaaacaattagtgaagcagtacgccagcgaccagtactatcgcgtctttcgtagcgcaaagattaaaggaaattatgccagctacgtaggtaagaccaactgtggaaatgagaagtcgaacccggagtcgtgtaaaccagaggagttcttcgcgttcctcaagaaggaattaaaaccactgtggtcccagaatatccccgccgccgcgtcactggctgcgaaattagagagcggcactttactccgtcgtcaacgctccggtgaaaatgcggccattccgtaccaagcccaccttcaagaattacaaattatcttaaagaacatgcaacaattttacccattcctgcagaaggcggacgagaatggtttcacccctgcatacaagatcgagaaactcttgacgtttcgtatcccttactacgttggtccgttaaacgacgcacataaagagaagggattctgttggatcgtcaagaaagcggacgttccagtgctgccctggaacttcgaccaagttgtcgatgagaatgcatgtgaggacgctttcattggccgtatgtctgcgacgtgtacttacttagtcggtgaaaacgtacttccccaaaactcgccactctattgtcgcttcatggtcttaaatgaattaaacaacttacgtatccgttcagagaaaattacgccggctttgaaacaggccatctttacacaattattttgtgctgggaagggtggtaaagttactcaaaagaagctcttggacttcttacacagccaaggtatcgacgcgaataaacaagacatttcgggtatcgatggtgacttcaaggcgtcgatggcgccagcagtgaaacttcagtctatctttactgaaccgttgccgcctgagatcctcgagcgtttagcatttgcacttaccgtgtcaggagagtctcacaaaatgttgcagaatcgtatccgtgccatccttcctaacgcggataacgcggtcattcgtaaggtgtgtgcgctcaagtttacaggatggggacgtttatcgcagaaacttctgactgaaatctacgacgtcgatcagactacaggggagtgtcgctccctcatggacttgctttggagtaccaataataaccttatgcaacttttatcaggcgacttcaccttcgcagcgggtattgacgcgtacaacgcggctcagaatggtaccgagaatatcttcgactacgatcacttggttaaggacttgtacgtctcaccgtcagtcaaacgtggtctgtggcagaccctgctgctggtcaaagaggtccgtaagattatgggttgcgatccggcccgtgtgttcattgaaatggcacgtggagtaagccctgaacagaagaataagcgtactgtaagccgtaaagaccaattactggccctctacaaggcatgtaaggaagacgcacgtgattggtgtggtgaattagaagcgttaccagaagataaattgcgttcggataaactttacctctactatacacaaatgggacgttgcatgtattcgggagagccaatccgtttagatgatctgatgcatgatacggcaaaccaactttacgatattgatcacatctaccctcaatccaagactaaagacgattcgctcactaatcgcgttcttgttaaacgtcaattgaatgcaatcaagtcgaatgactaccctttaccccagactatgcgccagaccgctctgtggaaggcactgctggagaagggcctcatttcaaaacagaaatacttacgtttgacacgtacgactcccttcactgaggaagagttggctggtttcattaatcgtcaattggtagagacccgtcaaagcactaaagcggccgcgcacttattggaacaattgctcccaaatacggaagtggtatacgtgaaagctggcttggccgccgactttcgtcaagagtttggcttcgttaaatgtcgtgacgcgaacgattttcatcatgcaaaagacgcatacttgaatgcggtcgtcgggaacgtctatcatgaaaagttcacgaagaacccattgcgcttcgttcgtagtggccaagagtattccttaaacttaagcgccttatttcagaattggaatatctacaaaggcggccgtgttatttggcagaaaggagaggatggtagcctggagactgtacgcgcccgtatggcgaagaatgatccaatggtcactcgttactgtacagaaggccgtggagcgctgtatgatttgcaaccgatgaagaagagtaaaggtcaactgcctcttaagtcgtcagacgagcgtttgcaacacattgatcgttatggcgggtacaataagctggctggcgcgtatttcacgttagcggcatactataagaagggtaaacgtgttaagtcaatcgagtcggtacccttatacctcgcggcaaaattgcaacgtgaccccgccgcactccaacaataccttgcagatcagctcggaacggatcgcgttgagatcctcgtacccgaaattaaactgggtactttatttaaatggaatgggtacccaatgacgttatcgggccgcacgggaccccagctgttatttcgtaacgcggccgagttacgtactaatgcagaacaagagcaatatattaagaagatgagtcgctacctggagaagtgtaaggggcgtaaagaacctcttccgattcgtccggcatacgataagttaacccccgaagagaatttacaattatatgacgcctttacacagtggttgactagtggaatttacgcgaagcgtctgagtttgcaagggaagtttcttcttgaaaagcgtgacgcgttcgccgcactgtcgccggaagcgcaagtccgccaattaatggaaattcttcacctgtttcaatgtaatccggtcgcagctaacctgtcggaactcggtggggctgcccatgcggggatcctgttggcaagcaagaacatcgatggtaaagtcccggtatcgattgttcaccagagcgtgactggttatttcactcaagaggtgtgtttaaatgatctg

SEQ ID NO: 5585 - DNA, 3294 bp, synthetic construct
  misc_feature 1..3294: note = Description of Artificial Sequence: Synthetic polynucleotide
  misc_feature 1..3294: note = MG21-1 sequence codon optimized for E. coli
  source 1..3294: mol_type = other DNA
atgaccagtcacagcatccgttatacccttggtttggacatcggaatcgcgagcgtgggatgggccgtccttcgcaacgggagcgactccgaaccttaccgtatcgaaacccttggtgtgcgtatctttgataaggctgaagtaccgaaaactggcgcaagccttgccgcccctcgtcgtgaggcccgttcatcccgtcgcgtagtccgtcgtcgtcgccatcgcaaggaacgcattaaatacctgatcgaacaagagggcattatgacccaggccgagatgacccgcttgttccagaacagctcgttcgagaagagcgtgtacgagattcgcgtagaggccctggaccgcatgctgacccgtgaagagacggtgcgtctcctcatccatttcgcgcaacgccgtgggtacaagagtaattcgaaggcagaagaggcgaaggacaatgaaaatggtgtgattaaacaggcaattagccaaaacaaacaggcaatgaaggcccacggttatcgtaccttcggagaaatgttattgatggacgagcgcttttactatacccaaccagatggttctcgtatctttatcccgcataacaaggcgagtgattataaggtgactgcggaacgtagtatgttggccgacgagttacacatgatcttcgctgcgcaacgtagtctcggttccctctggttcagcgacaccttcgagacagcatacatggacgtgtggagctcccaacgttccttcgatgagggcccaggcggcgactcaccgtatggtggctcgcagattgagaaaatgttagggacctctagcgacggcgagagccgcgcccctaaagccagctacagcgcggaatacttccgcctgctccaggatgtgaaccatctccgtatcgtgagcttagacggtacctcaagtcctctgacccaagagcaacgcgacattgtagtggctgcgagtaagaagagtggtaccttgacatacacccaattacgcaagaagctggctctcgcagatgaccaatactttaacgccctgtactacggcgataaaactgcagtcgaggtggagaagaagcgttttggtcatctgcagttctaccaccaactgcgtaccgcccttgacaccgtcgagaagggcgctgccgacacgctgacgtgggcccaacgcgacgaaatcgcacgcatcctgacagtttacaaggcggacgttcgtcgcaccgacgagttacgtaaagccggtatcccggcggagtacatccgcgccctgctcccattatcgccgacccgtgcgatgcacctgagtgtgacagctattcgcaagatgatccctcacttagaagccggtatgtcgtatagcgacgcctattccaaggcctatggcaaccaatcgacggcgtccgcagccccgaagaagaacaaactctcactgaacgatatcgaagagatcaccaacccggtagtacgtcgcgcggtcagccaatcgattaaagtgattaacgctatcgttcgtcagtatggcgcaccagagcgcgtgcgcatcgaattggcgcgtgagatgggtaagaattttaaggatcgtggcaaaatcgcaaagagtcaggccgaccacgcggctaagaatgagcgcatcaaagcccaaatctcagagtacaagagtgatcatattacgggccaagacattgttaagtttaaattgttcaaggaacaagatggcatttgcttatattcgggcaagtcgcttgatatcgcccgtcttttcgagccggggtacgtggacgtggatcatatcatcccgtactctatcagcttcgacgattcatacaataataaagttttggttttaagtagcgagaatcgccagaaaggcaaccgcatcccgtacgcatactttggccagaatagcgaccgttgggagaagtatgagacgcttgtatcaaataccgtccgcagttatcgtaaacgcaagaatttgcttctgaaaagccttagtgaagcccaaatcgacggttttaaacagcgtaacctgcaagacacccagtatctcagtaaagtaatctttcgccttattgaaaatcatctccaattcgcagagaccgctccgggcaagaagcacacgcaacccgttaacggtgcgattaccgcgcaagtgcgtaaacgtttgggcatcgaaaagattcgcgaagatggtgacttacaccacgcagtagacgcggccgtcatcgcgtgcatcaccccgggcatgattcaaaagatcaccaagtacgcgcagaaccatgaacgcttttacgccactgccaagggttacgttgatatcgagactggtgaggtgctgacccgtagtgaatacgaagcgatggacgacattcgcttcccggagccatggccggggtttcgcagcgagctggaagctcgcgtgagtgaacacccacaagaggcgatcgcgcgcctgaaattgccccattacgagaatagcgaagaaattcgccccattttcgtgtcgcgcatgccgaaccacaaggtcaccggcgcagcacacttggagactatccgtagtaagaaaggtggagcaggctctaccgtaactaagaccgccttgccggacctcaagttggataagaatggcgagatcgcaggctactatcgcaaggaagacgatccgttactgtatgaggctctcaaagcccgcttgaaagcgttcggcggagacggcaagaaggccttcgccgaaccttttcacaagccgaaacataacggtgagccgggccctatcgttaagaaagtcaagatccaagagtccgcgacgctgaccgtacccgtcaaccatggtatcgccgcgaacggctccatggtccgcttagacgtgtttcacgtcgatggtgacggctattacttcgttcccatctacacttcggacaccgtgaaacccgaattaccgaaccgcgcggtcgtcgcggggcgccgtgtccaagaatggaaagtgatggacgatagttactttaaatttagtttatacccgaaggatttaatccgtattcgcagtaagaagggtatcaaactcaaagcggtgaatcgcaacgccgaccttcaagaatacagcactaacgattgtctgtgttattttgtcaagttcaatatctctactggcgcgctgagcgtagagaatcacgaccgtaagttcgaacagcccggattgggtggtaaaaccctcttatcaattgagaagtaccaagtagacgtattaggaaattacagcccggtagccttaccagagaaacgcatgaaatttcgc

SEQ ID NO: 5586 - DNA, 4563 bp, synthetic construct
  misc_feature 1..4563: note = Description of Artificial Sequence: Synthetic polynucleotide
  misc_feature 1..4563: note = MG22-1 sequence codon optimized for E. coli
  source 1..4563: mol_type = other DNA
atgacgaagaatactcgtaatattatcggtctggatctgggcacgaactccatcggttggtcatggatccagcaactcattagcccgacaccgacccagccatcggagtacttgttcgatggcacccccatcatccgcatgagtggttcccgtatcatccctatgccgggtgacgtgaccgggtcattcgaacgtggagagactattagcaaaacgaaggatcgtactgccaaacgtatggcccgtcgtatgaatgagcgtttccagcttcgtcgcgagcgcttgaatcgtgtattaaacatcatggggttccttccggaacattacgctcgtgccctggatcgttatggtaagctgaatgaggagtctaatactactattgcctggcgttcgaaagaggatggtaagaacgagtttatcttttaccctagcttcttggagatggcctcgatcttcaaagaacatcatccggacattcagcgtatcccccttgattggacgttgtactacctgcgttctaaggcgttgcatcaggcgattactaaagaagagctctcctgggtcttgcactcatttaaccaaaagcgtgggtattaccagagccgtgaggatattacggaagaggataagaccaagaaagtggaatatattaagggcgtggtgaatagcgtcgaggatacgggcgagaaggccaagggtaagaagatctacaaggttacatttgcggacggaaccgaattcacctcgacgaaaagcgaggcaccactgtggatcggtcgtacgcgcgagattatcgttaccactagcctggatacttcaggcaagccgaagttagataaagagggtaagattatccaatctgcgaagaccccggacgaaaaggattggacgcttattaaaattcgtactgaggcaacgattgacgattctaagttgactgttggcgagtatatcttccatgcgctcctgaagaatccggaaacgaagattaagggcgcgcatgtttctacaattgatcgccgtttctatattaatgagattaatgcgattttgaaggaacaggagaagtatcacgaggagctgcgcgataaatcactgtatgaacaatgcacacaggcgctttacgcgcagaatgaggtgcgtcgtaatattattgcgccgtggtctatgagcgatcttctgatcaaggatattttattctatcaccgccctctcaagtctaagaaatcacagatcagcgagtgttcgttagaattccacacgtacacggataaggatggcgcgacccatcgtcagggaattaagtgtattccgaccagtcacccactgttccaagagtatcgtatctggcagtttatcgcgaatttacgcatctatgagcgcgaacgcttcgataatggaaaacatttcattaacgaggatcgcacgagcgacttcttaaccacgaagaagaaggaagagctgtacgagtggttagcagaaaaggacagcgttagtcaaaagacgctgcttggccatctgggcttaaaagtggagcgctaccattggaactttccggaagaaaagacttacccgtgcggcgagactcgtcacctcatccaatcacgcatgaagaaggcgaacctgcaaaaggcgtttcacagcctcatctcggacgaacagaaggactgctttgagcgcggcctgtggcacattttatacagtgttagcgattacaatgaactttgtaaagccctgaagaccttcgcgcgtaagaccggctttaccttagaggagcagtcgttgttcgtcgaggcattctcgtcgtgtcccccatttaagaaggattatggcgcatatagtaagcgtgctattacgaagctgctgccactcatgcgtattggcaagttctggcatgaggagagcattgacagtaccaccaaaacacgtatcgagcaccttattagcggcgaagagtgttcaggtattgatgtgcgtgtgcgcgagaaggtgacgaaggcgggtctgtgtgagtctatcgagcagtaccagggccttccgcagtggcttgccaattacgttgtatataatcgccacagtgaggctagcgagattacaaagtgggagtcgccggatgagctggataactatattcgtagctttaaacagtactcgttgcgtaaccccattgtcgaacaagtgagcttagagaccttacgtgttgtccgcgatttatggaccgagctgcagaaggaaggacagactatcgatgagattcacttagagatgggacgtgatctgaagaatacggcggaagagcgcagccgcatcttccgtcgtaatagtgaaaatgaggacacgatcttccgcattaaactgttattagaggaattctatgcgaatgagaaggatatcaaggatgttcgtccgtacagtccgtctcagcaggaattgttgcgtatttatgaggaaggtgtctggcagcaggagaaggacatcccacaggatattaaagatatcaagaagcgcatcagcaatgataaagatatcaaggatattaccccgaatgatattcagcgttatcgcatttggatggaccaaaagtactgctcaccgtatacggggaagaccattccgcttagccgcttgtttacaactgattatgagattgagcatgtaatcccccgcagtcgttacttcgatgatagctacaacaacaaagtgatttgtgaggcggcggttaataaggataagaataatcgtttagggatggagtatattatggccgcgggcggtaagacaatcgagctgggaaatggcaagaatgtgcagatcttaaaagaggaagagtatgtcgagttggtggataagattttcggtagtaatacccgtaaacgtaatattatgttggccgatgagattactgaggaattttctcaccgtcaattaaatgatacgcgttacatcgcacgctttatgaaaggtattttgtcaaatattgttcgtgaaaagaacgctgaggggactctcgagccggaagagacgtcaaagaaccttatcgtatgcagcggacgcattacggatcgtgtgaaacaggattggggcttgaatgatatctggaatcacattattaccccacgcttcgagcgcttaaataagaaaactagcagcaatgacttcggtgagtatgtatgtaaagagggaaagcgctactttcagacccgcgtaccgctgaaccttcagaaaggttttaataagaaacgtattgatcaccgtcatcatgcgatggacgcaatcgcaatcgcatgtattaaccgttcaattgtgaattatcttaataacgcagctgcgaatcagactgagcgtgaggatctgcgtcgcgcggtatgtatcccggagcgcaatggtcaaacgaagcgtcagctgcgcagtccgtggcactgcttcgcgcgcgatgccgagaatgcattgcgccagattgtcgtatctttcaaacaaaacttacgtgtggctacgaaggcaactaatagctatgagtgcttcgatacggccagcggaaagaagattcgcaagcatcaatcaaatcgcgagcattatgcgatccgcaagcctctgcataaggacagtgtgtatggcgaggtaattcttacgtcgattgcgagtgtgaacctgaagaaagcgctcctgaaggcggagcgcatcttggataagcgccttaaagaaaagattttcgaacttcgcaagttgtataactacagtaataagcagatcgaagagcacttaaccaaagtatgcattaactgccccgagtggaagaattatgactttaagaaaatcgcagtacgtatcctgagtaatgacgcggacgcaacccatatcgtagcaatccgcaagccactggatgagtcattcgacgaagtgaagattaatacgattactgataccggtattcagaaaatccttctgaatcatttgtcacgctatgcggacgatcccaagaaggcgttcagtcctgagggaattgaggatatgaacgcaaatattgcgtcattgaatggtggcaaacagcacttaccgatttacaaagttcgcgtgtccgagaaggataatggcggatactttccgatcggacagaagggcaaccgcccaaagaagtacgttaccactgcgaaggacacgaatctgttcttcgcagtctacgccgattccaagggtaaacgttcatataaaacgatcgacttacgtaccgctattgagtgtcgcaagcaggggctgagtgtcgcgccttctattaatgagaaaggggataagcttttgtttaccctgagcccgaatgatctggtgtacatgccatcagagggtgaggaagcgaatggcttcgcaattgataataacctgaataaggatcagatttacaaaatggtatccgcgaataataagcagtgtttcttcatcccacatacggttgctgatttcattagtcgcggtgaggagtataactctcacaataaaatcgagttgaccgaggatcgccgtagtattaaggaacactgtgtaccgttgaaggtaaatcgtttgggaaag

SEQ ID NO: 5587 - DNA, 4131 bp, synthetic construct
  misc_feature 1..4131: note = Description of Artificial Sequence: Synthetic polynucleotide
  misc_feature 1..4131: note = MG23-1 sequence codon optimized for E. coli
  source 1..4131: mol_type = other DNA
atgggcaagaagatgtacgttggtttggatatgggtactagttccgttggtctggcagtgacggatgagaactataagttataccgtgttaaaggtaaagactattggtgctctcgtaccttcgacgaagctgacacggcggtggaacgccgcactaatcgtattagccgccgccgtcgccaacgcgaagtggcacgtttggggattttgcgcgaattgttcgcagacgagatcgcaaaggtcgatccgggtttctacgcccgcctggatgaatccaaataccacctggaagatcgcgataacaagcaaccgtacgcaatcttcgccgacaaaggttacaccgacaaggagtattacgcacgttatcccacaatcttccacctgcgttcagaactcattgatagcgataaacctcatgatgtacgtttggtgtacttagcactggcgaatatgtttaagcatcgcggtcacttcctgaatgacagtttatcgagtgacaagccactggcggataccacggaagcctatagcaacttttactatactgcgtccgaactgagtatttcgtttcctgccgaagcacaaccggacagtatcgacgcagcttccctggaagccctgttgggcgataagggagtcagccgtacggacaaagccaagaatatctgtcagtatctggcgattgataagaagacgtcaaaacccctgtacacactgatcaatttaatctgtggcttgaacatcaagctcattgatatttacggggccgagctgatcgatgaggagaataagaagctttcgatcggctttcgtgatagttcgtacgagcaacaagatgcggacggtcgtaaattattaggagagaattacgctattatcgacgcggcgaaggagcttcatgacattggactgctgagcagtatcatgaagggatataagtacctgagccaagcgcgtgtagccctgtacgaggaacacgcggccgacttaaagaaactgaagagtgtgctgaagcgttacgataaagactcgtaccgtaaggtgtttcgttcgatggatgagggcagttattcggcttacatcggttctgttaattctggtacgaaaattcgtcgtggggttaaagatggtagcgcggacacattttgtaagtccatgaagaaggttctggagaaactgccaaaagacgacatggacgttcagtacctgctggcgaaggcgaccgacagttctctcttgccgaagcaactgaccttcgagaatggcgtgatcccgaaccaattacacgcggcagagatgaaagccatccttcgtcaagccgagaagtatttgccgtttctcttagaaaaggatgagtacgacctgactgtgagccaacgtatcattcaattatttacatttcgtattccgtattacgtaggaccgatcggaaagaaccatgcaggcgagaaaggttataacatttgggctactcgtcgcgcaggcgaggaagatggccgcgtgtacccgtggaacttcgagcaaaagatcgatactaaggcagcagcggagaaattcatcgaacgtatggttcgtcattgtacttatattaatggagaacgtacccttccgaagtgtagcttattatacgagaagtatatggtactgaacgaactcaataatctgcgcattaacggggagaagccggcggtgtcagtgaaacaagacatttataccaaactgttttgccgtggcaaacgtgtaacgatgaagatgctgaaagactatctctacaactcgtcccttatcccgtcgaaagaggacgtcgtgatttccgggatcgataatgggtttaatacgtcactgacgagcgtagggaaatttcgtgggatcctgggcgatgcggtgttcgcggatagtaatcaaaagatgattgaagacatcatcttttggggcacagtttacggaaacgataagaaatttctgaaggaacgcattgaagaggtctatggcgatcgccttaaccacgacgagattaagcgcatcttaggctttaactttaacgactggggcaacttaagccgtgagttcctggaactggaaggggagtgcgaatgtggtcgctgttccatcatccaggcccaatggaacacgaaccacaacctgatggaattacttagcgatcaatttaccttcaagaacgaactggagaagaagacgggatcagcggagaaagcgttagcggattggagcatcgacgatttagaggggaagtatctgtctgcgccggttaagcgtatgatttggcaaacgattaagatgttacgcgaagtgtgcgaagttacaggccgtaccccggacaaagtgttcgtcgagatggcgcgtgaagatggtgagaaaggcgctcgtactgtgagtcgtaagaagaaactgttagatctctacgatgccattaagcacgaggagcgtgaattagcaaaggtgtttagcgacgagatcgattctaagactgaggcagactttcgtagtaagaagctctacctctattatctgcaacagggtcgttgcatgtattccggcgacattatccacctgtcagatttaatgaacgataacctgtacgacattgatcacatttaccctcgtcacttcattaaggacgattccctggagaataacctggtactggtaaagaagcaaatcaataatcgtaaacaagacacctttcctattgaacgttcgatccaagaggacatgcgtcccttttggaagtcgcttgccgattcgggattcatttcagcggaaaagtacaaacgcctgactcgtcgcgacgcctttacggacgaagagaaagcggcctttatttcgcgtcaactggtagagacgcgtcaaggcaccaaggcgattgcagacatcctgaagcaagcactgccagacacggagattgtgtacgtcaaggctgggttagtatctgactttcgccaaaagttcgaactttataaagtgcgtgccctcaacgacactcaccatgcgaaggatgcatatttgaatattgtggtgggtaatacttattccaccaaattcacgaacaacccgctcaatttcatcaaggcgggcgctaaacgtccacaagataatcaatttaagtacaacatggataagattttcgattataacgtgattagtcgtggagaacgtgcatggatcgctggttccgacggcagcatctgtacggtgaagaaattcatgagtcgtaacacggtactgatcacccgtaaagcaaaggaagttcatggcgcgctttcaaataaggcgaccatctggggcaagaacgtggcgaaacccggtgcctacttacccgtgaagtcaactgacctgaaagcgcaagacgtaaccaaatatggtggtatcacgagtatcgcgaatagcggctacaccctcgctgaatacaaggttaatggtaagactacgcgtagtcttgaggcgctgccagtgtatctgggtcgtgctgagcaattaaccgaaaagactgtcgtggactatctgtcttcgtccctgcaggaaagttcgaagaagaagatcgaagacattcaggtccgtaaactgtttatcccacaaggttccaaggtgaagatcgatggcttttgctactacctgggcggtaagaccggcgacagcatctacctgaacaacgcagtgcctttgtatttatccagcactagcgaggagtatctgcgtaaactcctgaaggccgtggaaaataacaattataatgagcgcgacaagaatggtcagatcatcctgaccgcgccgaagaatgtccagctgttgtcgtcgatcttcgacaaattacgttcgaaaccgttctccaacaataagtggaacatttatttcagcatcgtgaacggcaaggagaccaaggtggagcaacttttcagtaagctgagcatcgacaaacaggcggaagtaatctcccaaattgtgatttggatcaactcaagccgtcagaatgtgaacctgagcctgatcggcggttcggcgcacagcggcacgcaagcgctcagtaagaccgtgtcgcgtctgaacgagtgtatgctgattagccagtctatcaccggaatttacgaacactctgtggatttattaacaatc

SEQ ID NO: 5588 - DNA, 3075 bp, synthetic construct
  misc_feature 1..3075: note = Description of Artificial Sequence: Synthetic polynucleotide
  misc_feature 1..3075: note = MG1-4 sequence codon optimized for Human
  source 1..3075: mol_type = other DNA
atgaagaagaaagtgttcgcctttgatctgggaaaggccagcattggttactgtgttcgcgatggattcaacatcaatgaagcaaactctataatcatcgataaggaccatgctgagactatgagtctgagagatcgtcggagaatcaagaaaacattagacgcacatcatgccagggaagagtactttaataaagtctggagcggcgtgggcctcaacatactggacaagaacaacaataattttaaaaaagagtttcctagcaaaaatgaggacgtaatttatacttcttgcctgctgcgcatcgctcttctccagaaccaaaagctggaggaatggcagatctacaaagccctgtacaacgcatttcagaggaggggatatgatgtcaacatcgcctggaagagtgtccaaacagatgacgataaggagaacatcgagaggatgaaaaaatacacttgcgagaacgacatagaacttattatctcagacgaatacaagtatccatgctattacgatgcacttcggctcggactgtggaatgaagacgaaccaaccaagcttaaccgttctatcccccagcataattctaataaagtgcgaaccacagaatacgtggccccacgtgaactggtggagaaggaattaaagcagttgtggttaaacgcccagctccagttacctcaattgaattctatatccgccgaagagttcctgtatggcgagtacaagatcccctacggctcatgcgtgcaaaaagaattcaagcagtacagagggactaaaaaagactggcagggggttctctgtcagaagatacctcgcttcgacaaccgcatcattgccaagtgcaagctgcttcccaagaggaatgtgtgcaaagcgaatacaatcgagaatgtgtcatttgtgttactgatgaagctgaagaacctgcgattcaccgtgatctccggagaaaagttacgcctgtctccagtacagatcaagcagatttatgagaactggctggaaaaggtggaggacacttataataaggacctcgagaaggcagaaaagctcgggaaagaaaatcctgagaagagactgaacatcacaatcactcggcaggaaattgagaagataatcggtgaaaaaattatcgacaaaatagaacccatgaaggctgacatctcaggcagatcatctttctgtcgaagagcttgccagattatgaacaaaatcattctggacggcgaactctatcctcagaatgtggatataagcgaattcgtcgaccgggataatgctaagaacggcatcacagaagaagagatccagtctatgctctccaaaattggtgattggaacaatctgtacatccccgataatcgggaggagaatgcgcagaatgcctcaaatagtcgaatcaagacagatatcatgttggggaacattaccaatcctatcgtgcgcaaccgcctgcagatattccgggacctgctcttaaaccttgccgaaaagtacgggacccctgatgaggtgatcttcgaattcgttcgagatggagctgacaacagcttgtatgggtcaaagaaagcccaggacacagagcggtttatgaaacaacaagagaaagagaacgaacagatcataaacgaactcaaggatgctggactctacgtcaatggacagaatcacgcgaatgcaacgtacttcctgatgcacaagctgctgaagtcacaaggaggcaaatgtatttattctggacaaaacatttcccctagtaattacgacgaatgcgagatagaccatatttacccaagaactctcgggggcaatgatgcattgtataacaaagtggtatgctaccgccgcgaaaatcaggataagaaaggtagaactccttacgaatggctcagtcctgactcagacaagtgggcaaattacgtcaaccgtttgaacaagatcaagaagcagcttggtaagaaaaaattcgagctcctgacatccaaaccagaagactgtgaaaaactgatcgaatcttacaacggactcgccgagacgtctcacatcgctcgtgtagcacagcaaatgacagccttcatcttcggatggggactccaaatccagggcgaatcccggaggatcttcgttaataatgggagcagcacatgtgcaatcagaaaacgctacggattaaacaaactgctgggcgataacctcaagaagaaccgcagcaacgataaacaccacgctcttgacgcaatctgtatctctttcagcagggactttaaatacgataaggaaattaagaaagacatcatcaagggattcaacccggagatagtcaagaacgcaattgataagatcatgccctacccttacgctaacgataagcccttcaaggggaacacaaagcctttggaaacgatctacggactgcggacttacggtgataagagttatattactcaacgggtggagctgaacagcatcgacaagaaggctaccaaaatcaagagtatcattgatgagactatcaagaacgacctgttgaataagctgaaggaaaacccgaccgaacaggaatggaaattgatgctccagaattatatccatcctaaaaagcagaccaaggtgaaaaaggttatgatctccgtttcagagggtgaaatcacaaaagactcaaacaacagagaacgcatgggagagtttgttgacttcgggactaagggaactcagcatcagtttaaacattccaaaaggcataaaggacagatcctgtactttaacgagaaaggtgttgtggaggtgatgccggtgtattccaacattaaaacaacagacgtcaaggacaaactgcaaaacatgggctgtaaactgtataacaagggccagatgttttactctgggtgtctggttgacatcccgaagccttttaaggccggatcaaaggagtaccccgcaggtcgttatcagataaagaccattcggtccgacaaagtggcagaacttgaagatgcgtgtggcaataagatcagtacaaatgtcaaatacctggtgccagccgagtttaagaaggttgagtcaaaa

SEQ ID NO: 5589 - DNA, 3177 bp, synthetic construct
  misc_feature 1..3177: note = Description of Artificial Sequence: Synthetic polynucleotide
  misc_feature 1..3177: note = MG1-6 sequence codon optimized for Human
  source 1..3177: mol_type = other DNA
atggaaaaagaaaagaacaaccatgtgtggggttttgatattgggaagggcagtctgggcgaagcagtgcgagtgggcggcgattttaagcacattgcctccgttctgcttgacccggagtttggagaaattaaaaccgccgctctcgcccgcaggcagatgcgcacgcgcaaggcccataaggcaagggaaaaatggctggaggagtgcctggatggaactggagttgagatcttaaagcgtcgtgaggttgggatagttgatggacagtggcggttgatatcaaaaggcgatgaacgcttggagcgggaattcccacccaatggcgaagaagtgtgctataatagtattgccctgcgttgtaaactgctcctgggagagaagctggaaggatggcaagtcttcaaggccttaaattctgcgatccaaaagaggggttacgatgaaaatatcccctggggcgaggctgaagagaagtccagcaagaaggacgaggacgactacgctcaaaagctgtcccagtacgagcgcgagaaaagtgaattgtttgagtctttcgctgacggagagaagtatgatttcccttgtttcttcaaagcatacaaaatggggttgtggagccccgaaaaccccagacgcgttgaggttaggatcgactgcagagctcaaaaagctaagtcctatgttgtagccagaaagtatgttgaaagggaattcgaatgtctggttgaagcggccgccaaatttttccccaagctcaagggccgagcaaagttcatcttgtacggcgtgagcgagactccctacgcgagctattacgggaacatgaggaaaaaattcggtcttaaacgaggcgcggagagcgattggaccgcactcgggcagaaagttccccgattcgataataggattatcgacaagtgcagattgataccacggatgaacgtttgcaaaatccggccactgaacgaggcccgtaacgagaaagatctgttgtactacgaagtgaccttagctttgaagttacttaatcttagattcttccgcaactcaaatatagagcaactcacatttgaagagtttaagaaagcatttgagattgcctccggagccaagtataagatgacgaagactgccatgaaaaaatttctgaagtccatcagcgccactgcactcggagacgactacgccgaaattgaacctcccaaagagtcagggagagcatccttctcacggcctgctatggacattttaaaggaattgattttctctgggatgccccctagagagttctacggacgcaaaattccagagatctccaacaccgacaagaataagggtgtggtggcgagtgatttagattttatcaaactcatgggcgattgtccctggggaggcatttttataccagacgtgcagacttaccagtttgctaacgctgctttccccaatcccgacgctcaaattaataaattgatcggctcacagaataacccgatagttagacatcggttgaccttctttttcgaacgaattaagttcctggaatcaaagtatggagtccccgacaaggtggtgttggagttcgtgcgggacgacttcatgggcgagaaggaaaagaaggagatgagaatcgccatgaaaaagcgggccgaagagaagatgatgattgccaaggatctggacgagcatgggttcaagggcggcaacctccttctgaagatggaattgtatcgtaaacagaacggaatttgtctgtacacaggagacgccctccctcttagtgaactcgcaactctggagatagaacacattgtgcctaggtcccgtggcggacctgacgctcaatacaattacgtgatcacaagggaaaagaccaacaaattgaagggggacaagaccccatacgagtggctcagcagcgatgccaaagaatgggccagctacacagaccgcgtgaatgcatgtgcaaaagcccttggaaagaagcgttgcaggctgttgctggaaaaagacgccgaggagctggtggaaaagtacacagctcttgctgaaaccgcacatattgccaaactggcccaaaagattgtatgtatgcacttcggattccagtttggaggattgagcggaacaaagcgggtcttcaccgttccaggcgctctgacaagtaggatccgtaagttctacggactcgatagaattctccataatgccgcggccgagtcagagaacctgagttttgaagaatttctcaaattcagtgaggacttggaaaagaaaaacaggaaaaacaaaaaacatcacgctctggatgctatgtgtctgtgctttgcccctactggagtggacagccggagggccaagctgggggaaatcctccccgagaaactgcgtagcgagaaagccgccagagagtttttcaagtcctatctggataagatcatgcccgtcgatgttgctccaaagaaacctcggctggaggacggaatctacagcaaaagaatcatcggcgggaaggcctgcatggtgaagaggaataacctggttgatctggcatacaagtcaggcctgaaacctgtcttcgatattccaaccctcatcaagctcgtggataagaaggagaagggaatcatcaatccacagattaggaaaatgattggggaattcgctgccactaaccctgacgagtccgcttggaggaaatggtgtgaggaggtccgtctgcccagtaaaagcgggcttggtgccagggtcctgcgggttctcgtgtactacggcgaggctgacgagtacaaggacctcagcaaagatgggtgcggcgcctacaggaagggagacgggcataagggacaagtggtatgggagtccgtggatggaaagtactatgtcgagcctgtctacgtccacgcctccaaggctggcgtcatggcagccttgaacgcgaatccgaaaaaaaagagaatttgcggaatgttcaatagccactgcacggtagacgtgggagacgtttataacgatcgaggcgattttattttgcccgcaggaagatatatggttaacactatcctgacaacaggcaggtgcgtattaacaaatgcagacggcgaaaaaagaaacccaatcaacattaactaccttatgcgagctgggatgcggcgggtcgaactgtcagagttg

SEQ ID NO: 5590 - DNA, 3402 bp, synthetic construct
  misc_feature 1..3402: note = Description of Artificial Sequence: Synthetic polynucleotide
  misc_feature 1..3402: note = MG3-6 sequence codon optimized for Human
  source 1..3402: mol_type = other DNA
atgtccacagatatgaagaattatcggatcggtgtggacgtgggcgatcggtcagtgggcttggcggctatagaattcgatgacgacggcctccctattcagaagctggccttggtaacattccggcacgatggggggctggatcctaccaaaaataaaactccgatgagccgtaaagagactcgaggaattgccaggcgcacaatgcgcatgaatcgtgagcggaagagaagattaaggaacctcgacaacgtgttagagaatctgggttacagcgtgcccgagggaccagagcccgagacatacgaggcctggacatctagggccctcctggcttccattaagctggcctccgctgacgagctgaatgagcaccttgtcagagccgttaggcacatggctagacaccgcgggtgggctaatccttggtggagcctggatcagctggagaaggccagccaggagccttctgagacttttgagataatccttgcccgtgctcgcgagcttttcggcgagaaggttcctgccaaccccaccctgggtatgttgggggctttagcagctaataacgaggttctcttgcgcccccgtgatgaaaagaagcggaagactggctatgttagaggtactccactcatgtttgcgcaagtccggcagggcgatcagttggctgagcttagacgaatttgcgaagtacaaggcatagaggaccaatacgaagcactgcgcctgggggtgttcgatcataagcacccttatgtgcctaaagagagggtgggcaaagaccctctgaatccgagcacaaacaggaccattcgggcaagtttggagtttcaagaatttaggatcctggactcagttgctaacctccgtgtgaggatcggtagccgggcgaagagagaactcaccgaagcggaatacgacgccgcggttgagttcttgatggattatgccgacaaggaacagccatcctgggccgatgtcgccgagaagataggggtccccggcaatagactcgtggcccccgtgctcgaagatgtccagcaaaagacagccccctatgatcgctccagtgcagcatttgaaaaagcaatgggcaagaagaccgaagccaggcaatggtgggaatccacggacgacgaccagctgaggtccttgttgatagcttttttggtagacgctactaatgataccgaggaagcagccgcggaagcaggcctgtccgagttgtataaaagttggcccgctgaagagcgcgaggccctctccaacatcgattttgaaaagggccgagtggcatattcacaagaaacactgtccaaactgtctgagtatatgcatgagtatcgcgtaggcctgcacgaggcacggaaggctgtattcggggtggacgacacctggcggcctccattagacaagctcgaagaaccaactggtcagccagccgtggatcgcgtcctgaccattcttagaaggtttgtattggattgcgaacgccagtggggccgcccccgcgcgatcacagtggagcacacacggaccggccttatggggccaactcagcggcagaaaatcctgaatgagcagaaaaagaaccgagccgataacgagcgtattcgggatgagttgcgcgagtccggagtggataacccaagccgggctgaggtacgaagacatttgatcgtgcaggagcaggaatgtcagtgtctttattgcgggaccatgatcaccaccacaacctctgaactcgatcacatagtgccacgggcagggggagggtcatccagacgagaaaacctcgccgccgtatgtcgggcctgcaacgctaagaagaagcgagagctcttctacgcttgggccggacctgtgaagagccaagaaaccatcgaaagagtgcgccagttgaaggctttcaaggactctaagaaagccaagatgttcaagaaccagatccgcaggctgaaccagactgaagcagacgaaccaattgacgagcgctctttggcttccacctcctatgctgctgttgctgtcagagaaaggctggaacagcattttaacgagggcctggccctggacgacaagtctcgggtggttcttgacgtgtatgccggggccgtgacccgtgagagtcgtagggctggtggcatagacgaacgcattttgttgagaggggagcgggacaagaaccgttttgatgtgagacatcacgcagtggacgcggccgtgatgaccctgttaaacagatctgtggccctcacgcttgaacagcggtcacagctccgcagaacattttatgagcaaggtctggacaagttagacaggaatcaactcaaacctgaagaagactggcgcgatttcacggggctcgcacccgcctctcaggagaagtttctggaatggcggaaggctgccactatcctgggcgacctcttagcggaggccatcgaagacgactctatcgcggtcgtaagcccacttcgtctgcggccacagaatggaagcgtccacctcgagacaataagcgcagtgaaaaaacaaacgttgggatcagattggcccgccgacgcggtcaaacgtatagtggaccctgagatctacttagcaatgaaggatgccctgggaaagctgaaagagttgcccgaagacagcgctcgctccctggaacttccagatggacgatttgtggaggccgatgacgaggtgcttttttttccagaaaacgcagcaagcattctgactccccgcggagtggccgagatcggaggctccattcaccatgcacgtctgtacggatggctgacgaagaagggtgagttgaaggttgggatgcttagggtttatggagcagagttcccatggttgatgagagagtccggtagcagaaacgtgctgtccatgcctatccaccgcggcagtcagagctttcgggatatgcaggataccacacggaaggcagtggagagtggcgaagctgtcgagttcgcttggatcacccagaatgacgagctcgaatttgaccccgatgactatatcgcccatggcggaaaagatgagttgagacaattcctcggctttatgcctgagtgtcgctggagggttgatggtttcaaaaagaactatcaaattcggatacgccccgctatgctgtccagagagcaactgccatccgatatccagaggaggctggaatcaaagacactgacgaaaaatgaatccctcctgctgaaggctctggataccggcctggtagtggcaattgggggcctgctgccactcgaaacgctgaaggttatccgtaggaacaacctcggattcccccggtggagaggaaacgggaatttgcccacgtccttcgaggtgaggagtagcgctctgagggccctcggagtggagggc

SEQ ID NO: 5591 - DNA, 3393 bp, synthetic construct
  misc_feature 1..3393: note = Description of Artificial Sequence: Synthetic polynucleotide
  misc_feature 1..3393: note = MG3-7 sequence codon optimized for Human
  source 1..3393: mol_type = other DNA
atgagcgaacatactaaatacagaatcggcatcgacgtgggagatcgatctgtgggattagcagccatcgagtttgatgacgatggatttcccctgtcaaacctggcgatggtaacgtataggcacgacggtggactggatcctacgaccaacaaatcacctaaaagcaggaaagagacaaggggtgtggctctccgaacaatgaggatgcggcgcagaaagaaaagccgcctgaaggatctcgacaaaaccctgcgagccctcggatatgtggttcccgcatgtgaggagccccagacatacgaggcttggaaaagcagggccctgctggccacgacaaaggttgagggggcccaagagctgggagaacatctggtacgggcagtgaggcatatggcccgtcatcgcggctggagaaacccatggtggactttcaatcagctggagatcgcgagcaccgctccttcagatacatttgcaaagatccgcgagcgggccgaaaaagaatggcctggagtggtgcccgaggaagccaccctggggatgattggcgcccttgcagcctctaataatgtgttgctgcgccctaggacctaccggaaggatcagccacggcactcaaagaaactgaatgttctgggacaagagcctatcctggtggacaaagtacgccaggaggacctccttgcagagcttcggacaatttgtaaaaagcaagacattgaggatcagtacgagaaattagcgcaggcagtattcgagcagacaaggccctacgttccactggatagggtcggcaaggatcccttgcaaccaaataagtcccgcgcctcacgcgcatccctggagtttcagcgcttccgcattcttgacgctgtggcgcatcttagagtgagggtgggggcgtcagaccgccgggcgctgacagacgaagagcacgataaagccgtccatttcctgatgggctacagtaagaaagacgtgccaacttggggtgatgtggcagacgagattggtgtcgagcccgcccatttaattgccccagtgatcgatgacgtgcgcttgaataaggcgccttatgatcgctccagcaccgaatttgaacagaaaatgaaaaagaagacaagagccagacagtggtgggacgaagctaatctggaatcccgtagtcaactgattctcttagtctctgaccctactgatgagacgatgcgcctcgccgaggtgtccggtctgtatgaggtgttcgagtcctggcctgacgaagaaaaggaggcactcgagggcctcaaggtcgaatctggcagggcagcttactctaccgatactttgaataagcttagcgaccatatgcgactcaaaagaatcgatttacacgaggcccgcaaaattgcgtttggcgttgacgacatgtggcacccaccactggataggatagacgaacccactggacagccgactgtcgatagggtgctgactatcgtgaggcggtttattttcgattgcgaacgcgcttgggggtgtcccgaaaatgttgtgatcgaacatgcgcgcacaggcttgatgggcccggcgcagagggctgacgtcctcaacgagatcgcaaagaacagaaagaaaaatgacaaaattcgagaagatctccgggccggaggaatcaacaaccctacccgcgcagacattcgcagaaatgcgattgtacaggatcaggagagccagtgcctgtactgcggagctacgataggcgtgagctactcagagctcgatcacatcgttcccagagctggcggcggtagttcccgccgggaaaacctcgctgcagtctgccgggcatgtaatgatagtaagaaagatacaccatttgccgtgtgggccaagaataccagtagacccgtgacgttggagggaacaatacagcggcttagggagcttaaagccttcaagcggcctaaggaccggagaatggtggatctgataatacggcgactgaagcagactgaaaaggacgatcccattgatgagcgaagcctggcctctacaagctacgcagctaccgccatcagagagcgcatcgagcagtatttcaatgagaaggctgagaagctcgacttggccaaagtgcatatcgacgtgtattccggatcattgaccagagaatcaaggagggccggggggatcgacaaaatggttcttttaaggggtcagtccgataagaacagattcgatgtgcgacaccatgcaatcgacgccgctgtccttactctgctgaataggtctgtcgcggtcaccctggagcaacgccgactgatcaaacaacagcgggaatattctctcgagaagtcccggagagaaagggataatgtgtggcgcgattttatgggactgggtccggccgcccaggaaaagtttgccaagtggaagaagactgcttacgtgctggccgatatcatcaaagaggcaatttcaaatgacgcaatccctgttgtcagccccctccggctgcgtcctcaaaatggatctgtgcaccttgacaccgttgatgccgtgctcgaaagaactattggcgatgcatggactgtcgaccaggtgcatcggatagtcaacccacagatctatctggcctttgccggatacttgggaaatcagaaggccctggaccctgacagcagcagagtccttgccttaaacgacggcaggaaactcacagcggaagacgtgatctatgtgttccctgagaaagccgcctccattttaacccctaggggagtcgtaaaaataggggagagcgtacatcacgtgcggctgtacgcttggaagaataggaaggggaaagcagaggtcgggatgctcagagtgtttggcgcagagtttccttggctgatgcgagagagcggggtaaaagatgtgctcagggtacctattcatacgggcagtcagtcctacagagacttgtcctttactgtgcgcaagaacatagaaaaaggcgaggcggccgagattggatggttgacacaaaacgaggagcttgagttcaatcctgaaagctacttgcaggaaggaggcaaagataaactggctaaattcctcgcatttctccccgagactcgctggcgcgttgatgggtttcctatgcccgataagcttcggattcggcctgctcttctctcacgcgaggaaatcccagaaggtgtgttccggaccgaagaacagagtcttctggaagaggctctcaccaaggggctgataattgcaactaaagggctcttgtctctccctgacgtgaaagtcttgcgccggaacaacctcggcattccgcggtggcggggtggatcctacagacccgtttccctggatatccagagggccgcactggcagctctggatgaacaggag

SEQ ID NO: 5592 - DNA, 960 bp, synthetic construct
  source 1..960: mol_type = other DNA
acggagagtttgattctggctcagaacgaacgctggcggcgtggataagacatgcaagtcgagcgggatacacagggtagcaatattctgtgtgttcagcggcgcaagggtgcgtaacacgtgggtaatttgccatgaagtctggaataacttgctgaaaggcgagctaatgccggatgtgacttccgaaaggcatcttttggaattcaaagttggggaccttaaccggcctgacgctttttgataagcccgcggtctatcagctagttggtgaggtaacggctcaccaaggctaagacggatagctggtctgagaggacgaccagccacactggaactgagacacggtccagacacctacgggtggcagcagtcgagaatttttcacaatgggcgaaagcctgatggagcgacgccgcgtgggggatgaatggcttcggcccgtaaacccctgtcatttgcgaacaaaccttactggtaaacaaccagtgagctgattgtagcggaagaggaagggacggctaactctgtgccagcagccgcggtaatacagaggtcccgagcgttgttcggattcactgggcgtaaagggtgcgtaggtggtgaggtaagtcggatgtgaaatctccgggctcaacccggaaatggcattggaaactaccttgcttgaggatttgaggggggattagaatacttggtgtagaagtgaaatgcgtagatatcaagtggaacaccagtggcgaaggcgaatccctggaaaatacctgacactgaggcacgaaagctaggggagcaaacaggatgagataccctggtagtcctagccctaaacggtgcttgcttgctgtaagaggaatcgacccctcttgtggcggagctaacgcgttaagcaagccgcctgggaagtacggtcgcaagattaaaactcaaagaaattgacgggggcctgcacaagcggtg

SEQ ID NO: 5593 - DNA, 1527 bp, synthetic construct
  source 1..1527: mol_type = other DNA
tcggagagtttgattctggctcagaacgaacgctggcggcgtggataagacatgcaagtcgaacgggatcattccggttggcaacaatcggggtgattcagtggcgaacgggtgcgtaacacgtgggaatctgcccggaagagggggatagcccgccgaaaggcggattaataccgtatatattgaaagtgggggaccgcaaggcctcacacttccggatgagcccgcgtcctatcagctagttggtggggtaatggcccaccaaggctttgacgggtagctggtctgagaggacgaccagccacactgggactgagacacggcccagacacctacgggtggcagcagtcgagaatttttcacaatgggggaaaccctgatggagcgacgccgcgtggaggatgaagggcttcggctcgtaaactcctgtcaccacagacaaatgattcacggtgaacatccgtgaagcttgatggtatgtggagaggaagggacggctaactctgtgccagcagccgcggtaatacagaggtcccaagcgttgttcggatttactgggcgtaaagggtgcgtaggaggtctggaaagtcgggtgtgaaatctcaccgcctaacggtgaaattgcgctcgaaactcccagactcgaggaccggagaggagaacggaattcctggtgtagcggtgaaatgcgtagatatcaggaggaacaccaacggcgaaggcagttctctggaaggttcctgactctgaggcacgaaggccaggggagcaaacgggattagataccccggtagtcctggcagtaaacggtgctcattaggtgtaggcggattcgaccccgtctgtgccgcagctaacgcgttaaatgagccgcctggggagtacggtcgcaagattaaaactcaaagaaattgacgggggcccgcacaagcggtggagtatgtggcttaattcgatgcaacgcgaagaaccttacctggtcttgacatgcattgttcatccgtggaaacacggtggcccgcaagggcgaattgcacaggtgctgcatggctgtcgtcagctcgtgtcgtgagatgttgggttaagtcccgcaacgagcgcaacccctatgattagttatatgcgcaagctcactagtcagactgccctgttcaacggggaggaaggtggggatgacgtcaagtcaggatggcccttatgaccagggctgcacacgtactacaatgcccactacagagggtcgcgaagccgtgaggtggagccaatcccagaaaagtgggcccagttcggatcggaggctgcaactcgcctccgtgaagttggaatcgctagtaatggcgcatcagctacggcgccgtgaatacgttcccgggccttgtacacactgcccgtcacatcatgaaagccggttgtacccgaagtcgtttggctaaccgcaaggaggccggcgcctaaggtatggctggtgattgggatgaagtcgtaacaaggtagccgtaggggaacctgcggctggatcacctcctt

SEQ ID NO: 5594 - DNA, 1472 bp, synthetic construct
  source 1..1472: mol_type = other DNA
taagagtttgatcctggctcaggattaacgctggcgggatgcctaacacatgcaagtcgagcggcagcacttcgggtggcgagcggcggacggctgaggaacacgttggtacctgccccaaactcagggataagccttcgaaaggaggtctaataccggatatccggaaacgggaaagatttatcggtttgggaggggcctgcgtcgtatcatgcttgttggtggggtaatggctcaccaaggctttgacgcgtatctggtgtgagagcatgaccagacagagtgggactgagacacggcccacactcctacgggaggcagcagtgaggaattttccgcaatggacgaaagtctgacggagcaatcccgcgtggaggacgacacctttcggggcgtaaactccttttctgagggaagaaattttgacggtacctcaggaataagcatcggctaactacgtgccagcagccgcggtaatacgtaggatgcaagcgttatccggaattactgggcgtaaagcgttcgaaggtggtgatatcagtctggtgttaaatccctgcggctcaaccgaggaatcgtaccggatactgtatcactagaggaatgcagaggaagctggaattcccattgtaggggtaaaatccgtagataatgggaggaacaccaaaagcgaaggcaggcttctgggcatttcctgacactgcgcgaacgaaagcgtggggagcgaaagggattagatacccctgtagtccacgccctaaacgatgatcactcgatatacgccggctcaatcccggtgtgtgtccaagctaacgcgttaagtgatccgcctgtggagtacggccgcaaggctaaaacataaaggaatagacggggatccacacaagcggtggagcatggggtttaattcgacagtaagcgaggaaccttaccaagacttgacatctttcgaattttctagaaatagaaaagtgccttcgggaacgaaatgacaggtgctgcatggttgtcgtcagctcgtgccttgaggtgtgcggttaagtccgtgaacgagcgcaaccctcgtcgtgtgttgtatttttcacacgagactgcccgttttacgcgggaggaaggtgaggatgacgtcaaatcagcatggcccttatgtcttgggcgacacccgtgctacaatggccggtacaaagggcagccaacccgcgagggggagcgaatcccaaaaagccggtctcagttcggattgaagtctgcaactcgacttcatgaagctggaatcgctagtaaccgtgaatcagccacgtcacggtgaatatgttcctggatcttgtactcaccgcccgtcaagtcacgaaaggtgggggcgcccgaagccgtgttatcccctcggggagcatgaccacggtgaaaccactgattgggactaagtcgtaacaaggtatccgtaggggaatctgcggatggatcacctcctt

SEQ ID NO: 5595 - DNA, 1542 bp, synthetic construct
  source 1..1542: mol_type = other DNA
acggagagtttgattctggctcagagtgaacgctggcggcgtggttaagacatgcaagtcgagcgagaacaaaagcgtagcaatacgtggatgagaaagcggcgaacgggtgcgtaacacgtaagcaacctgccctaaagacggggatagctcggggaaactcgaattaataccggatgtggtccttaaacacatgtaagaggaactaaagcttgagaaggcgctttaggaggggcttgcggcctatcagctagttggtaaggtaacggcttaccaaggcaaagacgggtagcgggtctgagaggacgatccgccacactggaactgagacacggtccagacacctacgggtggcagcagtttcgaatcattcacaatgggggcaaccctgatggtgcaacgccgcgtgggggacgaaggtcttcggattgtaaacccctgtcacacaggactaaccgcaaggttcatagccttgtctgaattaactgtgagaggaagtagtggctaactccgtgccagcagccgcggtaatacggagactacgagcgttactcggattcactgggcgtaaagggagcgcaggcgggatagtgtgttaggtgtgaaatgccggggcttaacttcggagctgcgcctaaaactattattctagagtgctggagaggtaagcggaatttccggtgtagcggtaaaatgcgcagatatcggaaggaacaccgaaggcgaaggcagcttactggacagaaactgacgctcatgctcgaaagcgtggggagcgaaagggattagatacccctgtagtccacgccctaaacgttgtacactaggtattggaggaatcatccccttcagtgccccagctaacgcgataagtgtaccgcctgaggactacgaccgcaaggttaaaactcaaagaaattgacgggggcccgcacaagcggtggagcatgtggcttaattcgatgcaacgcgaagaaccttacctgggtttgacatgtatttgaatatatgtgaaagcatatagtccttcgggacaggtacacagatgctgcatggctgtcgtcagctcgtgtcgtgagatgttcggttaagtccggcaacgagcgcaaccctcgccctatgttaccagcgggtaaagccggggactcttaggggacaagcctgtatacaggcgggaaggtggggatgacgtcaagtcagtatggctcttacatccagggctgcacacgtgctacaatggccgacacagagggatgctacgtcgcgaggcgatgcgaatctcgaaaatcggtctcagttcggattggatgtctgcaactcgactccatgaagccggaatcgctagtaaaggcgtatcagctacgacgccttgaatacgttcccgggccttgtacacaccgcccgtcaagtcatgaaagccggttttgcccgaagttcgtgagctaacccgcgaggggggcagcggcctaaggcaatgctggtgattgggactaagtcgtaacaaggtagccgtaggggaacctgcggctggatcacctcctt

SEQ ID NO: 5596 - RNA, 28 nt, synthetic construct
  misc_feature 1..28: note = Description of Artificial Sequence: Synthetic oligonucleotide
  misc_feature 1..28: note = test target sequence
  source 1..28: mol_type = other RNA
cgtgagccaccacgtcgcaagcctcgac

SEQ ID NO: 5597 - protein, 7 aa, unidentified
PKKKRKV

SEQ ID NO: 5598 - protein, 16 aa, Homo sapiens
  REGION 1..16: note = nucleoplasmin bipartite NLS
KRPAATKKAGQAKKKK

SEQ ID NO: 5599 - protein, 9 aa, Homo sapiens
  REGION 1..9: note = c-myc NLS
PAAKRVKLD

SEQ ID NO: 5600 - protein, 11 aa, Homo sapiens
  REGION 1..11: note = c-myc NLS
RQRRNELKRSP

SEQ ID NO: 5601 - protein, 38 aa, Mus sp.
  REGION 1..38: note = hnRNPA1 M9 NLS
NQSSNFGPMKGGNFGGRSSGPYGGGGQYFAKPRNQGGY

SEQ ID NO: 5602 - protein, 42 aa, Homo sapiens
  REGION 1..42: note = Importin-alpha IBB domain NLS
RMRIZFKNKGKDTAELRRRRVEVSVELRKAKKDEQILKRRNV

SEQ ID NO: 5603 - protein, 8 aa, unidentified
VSRKRPRP

SEQ ID NO: 5604 - protein, 8 aa, unidentified
PPKKARED

SEQ ID NO: 5605 - protein, 8 aa, Homo sapiens
PQPKKKPL

SEQ ID NO: 5606 - protein, 12 aa, synthetic construct
SALIKKKKKMAP

SEQ ID NO: 5607 - protein, 5 aa, unidentified
DRLRR

SEQ ID NO: 5608 - protein, 7 aa, unidentified
PKQKKRK

SEQ ID NO: 5609 - protein, 10 aa, unidentified
RKLKKKIKKL

SEQ ID NO: 5610 - protein, 10 aa, Mus sp.
  REGION 1..10: note = mouse Mx1 protein NLS
REKKKFLKRR

SEQ ID NO: 5611 - protein, 20 aa, Homo sapiens
  REGION 1..20: note = human poly(ADP-ribose) polymerase NLS
KRKGDEVDGVDEVAKKKSKK

SEQ ID NO: 5612 - protein, 17 aa, Homo sapiens
  REGION 1..17: note = steroid hormone receptors glucocorticoid NLS
RKCLQAGMNLEARKTKK

SEQ ID NO: 5613 - protein, 1053 aa, Staphylococcus aureus
  REGION 1..1053: note = J7RUA5_CAS9_STAAU (aligned to MG1-2, 6)
MKRNYILGLDIGITSVGYGIIDYETRDVIDAGVRLFKEANVENNEGRRSKRGARRLKRRRRHRIQRVKKLLFDYNLLTDHSELSGINPYEARVKGLSQKLSEEEFSAALLHLAKRRGVHNVNEVEEDTGNELSTKEQISRNSKALEEKYVAELQLERLKKDGEVRGSINRFKTSDYVKEAKQLLKVQKAYHQLDQSFIDTYIDLLETRRTYYEGPGEGSPFGWKDIKEWYEMLMGHCTYFPEELRSVKYAYNADLYNALNDLNNLVITRDENEKLEYYEKFQIIENVFKQKKKPTLKQIAKEILVNEEDIKGYRVTSTGKPEFTNLKVYHDIKDITARKEIIENAELLDQIAKILTIYQSSEDIQEELTNLNSELTQEEIEQISNLKGYTGTHNLSLKAINLILDELWHTNDNQIAIFNRLKLVPKKVDLSQQKEIPTTLVDDFILSPVVKRSFIQSIKVINAIIKKYGLPNDIIIELAREKNSKDAQKMINEMQKRNRQTNERIEEIIRTTGKENAKYLIEKIKLHDMQEGKCLYSLEAIPLEDLLNNPFNYEVDHIIPRSVSFDNSFNNKVLVKQEENSKKGNRTPFQYLSSSDSKISYETFKKHILNLAKGKGRISKTKKEYLLEERDINRFSVQKDFINRNLVDTRYATRGLMNLLRSYFRVNNLDVKVKSINGGFTSFLRRKWKFKKERNKGYKHHAEDALIIANADFIFKEWKKLDKAKKVMENQMFEEKQAESMPEIETEQEYKEIFITPHQIKHIKDFKDYKYSHRVDKKPNRELINDTLYSTRKDDKGNTLIVNNLNGLYDKDNDKLKKLINKSPEKLLMYHHDPQTYQKLKLIMEQYGDEKNPLYKYYEETGNYLTKYSKKDNGPVIKKIKYYGNKLNAHLDITDDYPNSRNKVVKLSLKPYRFDVYLDNGVYKFVTVKNLDVIKKENYYEVNSKCYEEAKKLKKISNQAEFIASFYNNDLIKINGELYRVIGVNNDLLNRIEVNMIDITYREYLENMNDKRPPRIIKTIASKTQSIKKYSTDILGNLYEVKSKKHPQIIKKG

SEQ ID NO: 5614 - protein, 1101 aa, Actinomyces naeslundii
  REGION 1..1101: note = J3F2B0_CAS9_ACTNH_4ogc (aligned to MG3)
MWYASLMSAHHLRVGIDVGTHSVGLATLRVDDHGTPIELLSALSHIHDSGVGKEGKKDHDTRKKLSGIARRARRLLHHRRTQLQQLDEVLRDLGFPIPTPGEFLDLNEQTDPYRVWRVRARLVEEKLPEELRGPAISMAVRHIARHRGWRNPYSKVESLLSPAEESPFMKALRERILATTGEVLDDGITPGQAMAQVALTHNISMRGPEGILGKLHQSDNANEIRKICARQGVSPDVCKQLLRAVFKADSPRGSAVSRVAPDPLPGQGSFRRAPKCDPEFQRFRIISIVANLRISETKGENRPLTADERRHVVTFLTEDSQADLTWVDVAEKLGVHRRDLRGTAVHTDDGERSAARPPIDATDRIMRQTKISSLKTWWEEADSEQRGAMIRYLYEDPTDSECAEIIAELPEEDQAKLDSLHLPAGRAAYSRESLTALSDHMLATTDDLHEARKRLFGVDDSWAPPAEAINAPVGNPSVDRTLKIVGRYLSAVESMWGTPEVIHVEHVRDGFTSERMADERDKANRRRYNDNQEAMKKIQRDYGKEGYISRGDIVRLDALELQGCACLYCGTTIGYHTCQLDHIVPQAGPGSNNRRGNLVAVCERCNRSKSNTPFAVWAQKCGIPHVGVKEAIGRVRGWRKQTPNTSSEDLTRLKKEVIARLRRTQEDPEIDERSMESVAWMANELHHRIAAAYPETTVMVYRGSITAAARKAAGIDSRINLIGEKGRKDRIDRRHHAVDASVVALMEASVAKTLAERSSLRGEQRLTGKEQTWKQYTGSTVGAREHFEMWRGHMLHLTELFNERLAEDKVYVTQNIRLRLSDGNAHTVNPSKLVSHRLGDGLTVQQIDRACTPALWCALTREKDFDEKNGLPAREDRAIRVHGHEIKSSDYIQVFSKRKKTDSDRDETPFGAIAVRGGFVEIGPSIHHARIYRVEGKKPVYAMLRVFTHDLLSQRHGDLFSAVIPPQSISMRCAEPKLRKAITTGNATYLGWVVVGDELEINVDSFTKYAIGRFLEDFPNTTRWRICGYDTNSKLTLKPIVLAAEGLENPSSAVNEIVELKGWRVAINVLTKVHPTVVRRDALGRPRYSSRSNLPTSWTIE

SEQ ID NO: 5615 - protein, 9 aa, unidentified
  REGION 1..9: note = Description of Unknown: uncultivated organism
  REGION 1..9: note = MG1-1 to 1-3 MOTIF
RHHALDAMV

SEQ ID NO: 5616 - protein, 9 aa, unidentified
  REGION 1..9: note = Description of Unknown: uncultivated organism
  REGION 1..9: note = MG1 motif 2.1
KHHALDAMC

SEQ ID NO: 5617 - protein, 9 aa, unidentified
  REGION 1..9: note = Description of Unknown: uncultivated organism
  REGION 1..9: note = MG1 motif 2.2
KHHALDAIC

SEQ ID NO: 5618 - protein, 8 aa, unidentified
  REGION 1..8: note = Description of Unknown: uncultivated organism
  REGION 1..8: note = MG1 motif 3
  MOD_RES 2: note = Any amino acid
PXGFSRPA

SEQ ID NO: 5619 - protein, 8 aa, unidentified
  REGION 1..8: note = Description of Unknown: uncultivated organism
  REGION 1..8: note = MG1 motif 4
  MOD_RES 2: note = Any amino acid
PXGFCRPA

SEQ ID NO: 5620 - protein, 8 aa, unidentified
  REGION 1..8: note = Description of Unknown: uncultivated organism
  REGION 1..8: note = MG1 motif 5
  MOD_RES 2: note = Any amino acid
PXGYCRPA

SEQ ID NO: 5621 - protein, 8 aa, unidentified
  REGION 1..8: note = Description of Unknown: uncultivated organism
  REGION 1..8: note = MG1 motif 6
  MOD_RES 2: note = Any amino acid
PXGYSRPA

SEQ ID NO: 5622 - protein, 10 aa, unidentified
  REGION 1..10: note = Description of Unknown: uncultivated organism
  REGION 1..10: note = MG1 motif 7
  MOD_RES 8..9: note = Any amino acid
PIVRHRLXXF

SEQ ID NO: 5623 - protein, 10 aa, unidentified
  REGION 1..10: note = Description of Unknown: uncultivated organism
  REGION 1..10: note = MG1 motif 8
  MOD_RES 8..9: note = Any amino acid
PVVRHRLXXF

SEQ ID NO: 5624 - protein, 10 aa, unidentified
  REGION 1..10: note = Description of Unknown: uncultivated organism
  REGION 1..10: note = MG1 motif 9
  MOD_RES 8..9: note = Any amino acid
PLVRHRLXXF

SEQ ID NO: 5625 - protein, 13 aa, unidentified
  REGION 1..13: note = Description of Unknown: uncultivated organism
  REGION 1..13: note = MG1 motif 10
  MOD_RES 5: note = Any amino acid
  MOD_RES 10: note = Any amino acid
FKALXSAIQXRGY

SEQ ID NO: 5626 - protein, 13 aa, unidentified
  REGION 1..13: note = Description of Unknown: uncultivated organism
  REGION 1..13: note = MG1 motif 11
  MOD_RES 5: note = Any amino acid
  MOD_RES 10: note = Any amino acid
FKALXNAIQXRGY

SEQ ID NO: 5627 - protein, 13 aa, unidentified
  REGION 1..13: note = Description of Unknown: uncultivated organism
  REGION 1..13: note = MG1 motif 12
  MOD_RES 5: note = Any amino acid
  MOD_RES 10: note = Any amino acid
YKALXSAIQXRGY

SEQ ID NO: 5628 - protein, 13 aa, unidentified
  REGION 1..13: note = Description of Unknown: uncultivated organism
  REGION 1..13: note = MG1 motif 13
  MOD_RES 5: note = Any amino acid
  MOD_RES 10: note = Any amino acid
YKALXNAIQXRGY

SEQ ID NO: 5629 - protein, 7 aa, unidentified
  REGION 1..7: note = Description of Unknown: uncultivated organism
  REGION 1..7: note = MG1 motif 14
LKLLNLR

SEQ ID NO: 5630 - protein, 7 aa, unidentified
  REGION 1..7: note = Description of Unknown: uncultivated organism
  REGION 1..7: note = MG1 motif 15
MKLLNLR

SEQ ID NO: 5631 - protein, 11 aa, unidentified
  REGION 1..11: note = Description of Unknown: uncultivated organism
  REGION 1..11: note = MG1, MG2 motif 1
  MOD_RES 4: note = Any amino acid
  MOD_RES 9..10: note = Any amino acid
PRFXNRIIXXC

SEQ ID NO: 5632 - protein, 11 aa, unidentified
  REGION 1..11: note = Description of Unknown: uncultivated organism
  REGION 1..11: note = MG1, MG2 motif 2
  MOD_RES 4: note = Any amino acid
  MOD_RES 9..10: note = Any amino acid
PRFXNRILXXC

SEQ ID NO: 5633 - protein, 7 aa, unidentified
  REGION 1..7: note = Description of Unknown: uncultivated organism
  REGION 1..7: note = MG2 motif 1
NNHLVRH

SEQ ID NO: 5634 - protein, 7 aa, unidentified
  REGION 1..7: note = Description of Unknown: uncultivated organism
  REGION 1..7: note = MG2 motif 2
NNHLIRH

SEQ ID NO: 5635 - protein, 7 aa, unidentified
  REGION 1..7: note = Description of Unknown: uncultivated organism
  REGION 1..7: note = MG2 motif 3
NNHIVRH

SEQ ID NO: 5636 - protein, 7 aa, unidentified
  REGION 1..7: note = Description of Unknown: uncultivated organism
  REGION 1..7: note = MG2 motif 4
  MOD_RES 4: note = Any amino acid
EFLXFRW

SEQ ID NO: 5637 - protein, 7 aa, unidentified
  REGION 1..7: note = Description of Unknown: uncultivated organism
  REGION 1..7: note = MG2 motif 5
  MOD_RES 4: note = Any amino acid
EFLXYRW

SEQ ID NO: 5638 - protein, 7 aa, unidentified
  REGION 1..7: note = Description of Unknown: uncultivated organism
  REGION 1..7: note = MG2 motif 6
  MOD_RES 4: note = Any amino acid
EFMXFRW

SEQ ID NO: 5639 - protein, 8 aa, unidentified
  REGION 1..8: note = Description of Unknown: uncultivated organism
  REGION 1..8: note = MG3 motif 1
EPQTYEAW

SEQ ID NO: 5640 - protein, 8 aa, unidentified
  REGION 1..8: note = Description of Unknown: uncultivated organism
  REGION 1..8: note = MG3 motif 2
EPETYEAW

SEQ ID NO: 5641 - protein, 9 aa, unidentified
  REGION 1..9: note = Description of Unknown: uncultivated organism
  REGION 1..9: note = MG3 motif 3
HLVRAVRHM

SEQ ID NO: 5642 - protein, 8 aa, unidentified
  REGION 1..8: note = Description of Unknown: uncultivated organism
  REGION 1..8: note = MG3 motif 4
  MOD_RES 4: note = Any amino acid
MRMXRRKK

SEQ ID NO: 5643 - protein, 8 aa, unidentified
  REGION 1..8: note = Description of Unknown: uncultivated organism
  REGION 1..8: note = MG3 motif 5
MRMRRRRK

SEQ ID NO: 5644 - protein, 8 aa, unidentified
  REGION 1..8: note = Description of Unknown: uncultivated organism
  REGION 1..8: note = MG3 motif 6
  MOD_RES 2..3: note = Any amino acid
NXXLLRPR

SEQ ID NO: 5645 - protein, 15 aa, unidentified
  REGION 1..15: note = Description of Unknown: uncultivated organism
  REGION 1..15: note = MG3 motif 7
  MOD_RES 2: note = Any amino acid
  MOD_RES 13..14: note = Any amino acid
QXDVLAELRRICXXQ

SEQ ID NO: 5646 - protein, 15 aa, unidentified
  REGION 1..15: note = Description of Unknown: uncultivated organism
  REGION 1..15: note = MG3 motif 8
  MOD_RES 2: note = Any amino acid
  MOD_RES 13..14: note = Any amino acid
QXDLLAELRTICXXQ

SEQ ID NO: 5647 - protein, 15 aa, unidentified
  REGION 1..15: note = Description of Unknown: uncultivated organism
  REGION 1..15: note = MG3 motif 9
  MOD_RES 2: note = Any amino acid
  MOD_RES 13..14: note = Any amino acid
QXDQLAELRRICXXQ

SEQ ID NO: 5648 - protein, 11 aa, unidentified
  REGION 1..11: note = Description of Unknown: uncultivated organism
  REGION 1..11: note = MG3 motif 10
  MOD_RES 3..4: note = Any amino acid
VPXXRVGKDPL

SEQ ID NO: 5649 - protein, 10 aa, unidentified
  REGION 1..10: note = Description of Unknown: uncultivated organism
  REGION 1..10: note = MG4 motif 1
  MOD_RES 5: note = Any amino acid
  MOD_RES 8: note = Any amino acid
QQFRXLQXVN

SEQ ID NO: 5650 - protein, 9 aa, unidentified
  REGION 1..9: note = Description of Unknown: uncultivated organism
  REGION 1..9: note = MG14 motif 1
  MOD_RES 2: note = Any amino acid
HXDGTSRAL

SEQ ID NO: 5651 - protein, 9 aa, unidentified
  REGION 1..9: note = Description of Unknown: uncultivated organism
  REGION 1..9: note = MG14 motif 2
  MOD_RES 2: note = Any amino acid
HXNGTSRAL

SEQ ID NO: 5652 - protein, 9 aa, unidentified
  REGION 1..9: note = Description of Unknown: uncultivated organism
  REGION 1..9: note = MG14 motif 3
  MOD_RES 2: note = Any amino acid
HXGGTSRAL

SEQ ID NO: 5653 - protein, 9 aa, unidentified
  REGION 1..9: note = Description of Unknown: uncultivated organism
  REGION 1..9: note = MG14 motif 4
  MOD_RES 2: note = Any amino acid
HXDGSEQAL

SEQ ID NO: 5654 - protein, 7 aa, unidentified
  REGION 1..7: note = Description of Unknown: uncultivated organism
  REGION 1..7: note = MG14 motif 5
  MOD_RES 5: note = Any amino acid
SELVXAY

SEQ ID NO: 5655 - protein, 7 aa, unidentified
  REGION 1..7: note = Description of Unknown: uncultivated organism
  REGION 1..7: note = MG14 motif 6
  MOD_RES 5: note = Any amino acid
SEMVXAY

SEQ ID NO: 5656 - protein, 7 aa, unidentified
  REGION 1..7: note = Description of Unknown: uncultivated organism
  REGION 1..7: note = MG14 motif 7
  MOD_RES 5: note = Any amino acid
SELCXAY

SEQ ID NO: 5657 - protein, 10 aa, unidentified
  REGION 1..10: note = Description of Unknown: uncultivated organism
  REGION 1..10: note = MG14 motif 8
  MOD_RES 5..8: note = Any amino acid
FKGVXXXXEK

SEQ ID NO: 5658 - protein, 10 aa, unidentified
  REGION 1..10: note = Description of Unknown: uncultivated organism
  REGION 1..10: note = MG14 motif 9
  MOD_RES 5..8: note = Any amino acid
FKGIXXXXEK

SEQ ID NO: 5659 - protein, 8 aa, unidentified
  REGION 1..8: note = Description of Unknown: uncultivated organism
  REGION 1..8: note = MG14 motif 10
  MOD_RES 6: note = Any amino acid
LADAVXEA

SEQ ID NO: 5660 - protein, 8 aa, unidentified
  REGION 1..8: note = Description of Unknown: uncultivated organism
  REGION 1..8: note = MG14 motif 11
  MOD_RES 6: note = Any amino acid
LGDAVXEA

SEQ ID NO: 5661 - protein, 8 aa, unidentified
  REGION 1..8: note = Description of Unknown: uncultivated organism
  REGION 1..8: note = MG14 motif 12
  MOD_RES 6..7: note = Any amino acid
EEPEVXXL

SEQ ID NO: 5662 - protein, 8 aa, unidentified
  REGION 1..8: note = Description of Unknown: uncultivated organism
  REGION 1..8: note = MG14 motif 13
  MOD_RES 6..7: note = Any amino acid
EEPEIXXL

SEQ ID NO: 5663 - protein, 8 aa, unidentified
  REGION 1..8: note = Description of Unknown: uncultivated organism
  REGION 1..8: note = MG14 motif 14
  MOD_RES 6..7: note = Any amino acid
EDPEVXXL

SEQ ID NO: 5664 - protein, 11 aa, unidentified
  REGION 1..11: note = Description of Unknown: uncultivated organism
  REGION 1..11: note = MG14 motif 15
  MOD_RES 5: note = Any amino acid
  MOD_RES 7: note = Any amino acid
  MOD_RES 9..10: note = Any amino acid
NPVVXRXMXXM

SEQ ID NO: 5665 - protein, 11 aa, unidentified
  REGION 1..11: note = Description of Unknown: uncultivated organism
  REGION 1..11: note = MG14 motif 16
  MOD_RES 5: note = Any amino acid
  MOD_RES 7: note = Any amino acid
  MOD_RES 9..10: note = Any amino acid
NPVVXRXTXXV

SEQ ID NO: 5666 - protein, 14 aa, unidentified
  REGION 1..14: note = Description of Unknown: uncultivated organism
  REGION 1..14: note = MG14 motif 17
  MOD_RES 2: note = Any amino acid
  MOD_RES 4: note = Any amino acid
  MOD_RES 6..7: note = Any amino acid
  MOD_RES 10: note = Any amino acid
  MOD_RES 12: note = Any amino acid
DXRXYXXVGXCXYF

SEQ ID NO: 5667 - protein, 14 aa, unidentified
  REGION 1..14: note = Description of Unknown: uncultivated organism
  REGION 1..14: note = MG14 motif 18
  MOD_RES 4: note = Any amino acid
  MOD_RES 6..8: note = Any amino acid
  MOD_RES 13: note = Any amino acid
VLYXLXXXRGYIXH

SEQ ID NO: 5668 - protein, 12 aa, unidentified
  REGION 1..12: note = Description of Unknown: uncultivated organism
  REGION 1..12: note = MG15 motif 1
  MOD_RES 2: note = Any amino acid
  MOD_RES 4..6: note = Any amino acid
DXIXXXFSVYKN

SEQ ID NO: 5669 - protein, 10 aa, unidentified
  REGION 1..10: note = Description of Unknown: uncultivated organism
  REGION 1..10: note = MG15 motif 2
YSRACERAGY

SEQ ID NO: 5670 - protein, 8 aa, unidentified
  REGION 1..8: note = Description of Unknown: uncultivated organism
  REGION 1..8: note = MG15 motif 3
VKRSISQT

SEQ ID NO: 5671 - protein, 8 aa, unidentified
  REGION 1..8: note = Description of Unknown: uncultivated organism
  REGION 1..8: note = MG15 motif 4
VKRAISQT

SEQ ID NO: 5672 - protein, 13 aa, unidentified
  REGION 1..13: note = Description of Unknown: uncultivated organism
  REGION 1..13: note = MG15 motif 5
  MOD_RES 9: note = Any amino acid
  MOD_RES 12: note = Any amino acid
KACYKILPXLEXG

SEQ ID NO: 5673 - protein, 13 aa, unidentified
  REGION 1..13: note = Description of Unknown: uncultivated organism
  REGION 1..13: note = MG15 motif 6
  MOD_RES 9: note = Any amino acid
  MOD_RES 12: note = Any amino acid
KACYKLLPXLEXG

SEQ ID NO: 5674 - protein, 8 aa, unidentified
  REGION 1..8: note = Description of Unknown: uncultivated organism
  REGION 1..8: note = MG15, MG21 motif 1
  MOD_RES 6: note = Any amino acid
QKLIPXLE

SEQ ID NO: 5675 - protein, 8 aa, unidentified
  REGION 1..8: note = Description of Unknown: uncultivated organism
  REGION 1..8: note = MG15, MG21 motif 2
  MOD_RES 6: note = Any amino acid
RKLIPXLE

SEQ ID NO: 5676 - protein, 16 aa, unidentified
  REGION 1..16: note = Description of Unknown: uncultivated organism
  REGION 1..16: note = MG16 motif 1
  MOD_RES 2..4: note = Any amino acid
  MOD_RES 7..8: note = Any amino acid
  MOD_RES 11..12: note = Any amino acid
WXXXKAXXKGXXGNTT

SEQ ID NO: 5677 - protein, 16 aa, unidentified
  REGION 1..16: note = Description of Unknown: uncultivated organism
  REGION 1..16: note = MG16 motif 2
  MOD_RES 2..4: note = Any amino acid
  MOD_RES 7..8: note = Any amino acid
  MOD_RES 11..12: note = Any amino acid
WXXXKAXXKGXXGNAT

SEQ ID NO: 5678 - protein, 16 aa, unidentified
  REGION 1..16: note = Description of Unknown: uncultivated organism
  REGION 1..16: note = MG16 motif 3
  MOD_RES 2..4: note = Any amino acid
  MOD_RES 7..8: note = Any amino acid
  MOD_RES 11..12: note = Any amino acid
WXXXRAXXKGXXGNTT

SEQ ID NO: 5679 - protein, 14 aa, unidentified
  REGION 1..14: note = Description of Unknown: uncultivated organism
  REGION 1..14: note = MG18 motif 1
WITLFCDEKKMLVT

SEQ ID NO: 5680 - protein, 11 aa, unidentified
  REGION 1..11: note = Description of Unknown: uncultivated organism
  REGION 1..11: note = MG18 motif 2
HTNKNFMELLS

SEQ ID NO: 5681 - protein, 11 aa, unidentified
  REGION 1..11: note = Description of Unknown: uncultivated organism
  REGION 1..11: note = MG18 motif 3
HTNKNLMELLS

SEQ ID NO: 5682 - protein, 20 aa, unidentified
  REGION 1..20: note = Description of Unknown: uncultivated organism
  REGION 1..20: note = MG18 motif 4
IKAIKKLKYKDWGRLSATLL

SEQ ID NO: 5683 - protein, 21 aa, unidentified
  REGION 1..21: note = Description of Unknown: uncultivated organism
  REGION 1..21: note = MG18 motif 5
CTYLVGEDVLPKESLLYSEFM

SEQ ID NO: 5684 - protein, 18 aa, unidentified
  REGION 1..18: note = Description of Unknown: uncultivated organism
  REGION 1..18: note = MG18 motif 6
TVDGERLPVDVLEKIFKQ

SEQ ID NO: 5685 - protein, 17 aa, unidentified
  REGION 1..17: note = Description of Unknown: uncultivated organism
  REGION 1..17: note = MG18 motif 7
  MOD_RES 11: note = Any amino acid
EQGRCWVVRKXEKIYPW

SEQ ID NO: 5686 - protein, 11 aa, unidentified
  REGION 1..11: note = Description of Unknown: uncultivated organism
  REGION 1..11: note = MG18 motif 8
QNIGGIDDKIN

SEQ ID NO: 5687 - protein, 10 aa, unidentified
  REGION 1..10: note = Description of Unknown: uncultivated organism
  REGION 1..10: note = MG21 motif 1
  MOD_RES 4..5: note = Any amino acid
  MOD_RES 7: note = Any amino acid
SYHXXRXALD

SEQ ID NO: 5688 - protein, 22 aa, unidentified
  REGION 1..22: note = Description of Unknown: uncultivated organism
  REGION 1..22: note = MG21 motif 2
  MOD_RES 5: note = Any amino acid
  MOD_RES 11: note = Any amino acid
  MOD_RES 15: note = Any amino acid
  MOD_RES 19..21: note = Any amino acid
NPVVXRAVSQXIKVXNAVXXXY

SEQ ID NO: 5689 - protein, 20 aa, unidentified
  REGION 1..20: note = Description of Unknown: uncultivated organism
  REGION 1..20: note = MG21 motif 3
  MOD_RES 5..6: note = Any amino acid
  MOD_RES 8: note = Any amino acid
  MOD_RES 11: note = Any amino acid
  MOD_RES 14: note = Any amino acid
  MOD_RES 17: note = Any amino acid
CTFEXXEXRAXKAXYTXEYF

SEQ ID NO: 5690 - protein, 14 aa, unidentified
  REGION 1..14: note = Description of Unknown: uncultivated organism
  REGION 1..14: note = MG21 motif 4
  MOD_RES 3: note = Any amino acid
  MOD_RES 6..7: note = Any amino acid
  MOD_RES 10: note = Any amino acid
YDXACXXVYXDHRG

SEQ ID NO: 5691 - protein, 14 aa, unidentified
  REGION 1..14: note = Description of Unknown: uncultivated organism
  REGION 1..14: note = MG21 motif 5
  MOD_RES 3: note = Any amino acid
  MOD_RES 6..7: note = Any amino acid
  MOD_RES 10: note = Any amino acid
YDXACXXIYXDHRG

SEQ ID NO: 5692 - protein, 6 aa, unidentified
  REGION 1..6: note = Description of Unknown: uncultivated organism
  REGION 1..6: note = MG21 motif 6
KLLQDL

SEQ ID NO: 5693 - protein, 14 aa, unidentified
  REGION 1..14: note = Description of Unknown: uncultivated organism
  REGION 1..14: note = MG21 motif 7
  MOD_RES 2: note = Any amino acid
  MOD_RES 5..6: note = Any amino acid
  MOD_RES 9: note = Any amino acid
  MOD_RES 13: note = Any amino acid
EXAYXXILXSQRXF

SEQ ID NO: 5694 - protein, 11 aa, unidentified
  REGION 1..11: note = Description of Unknown: uncultivated organism
  REGION 1..11: note = MG22 motif 1
  MOD_RES 5: note = Any amino acid
  MOD_RES 8..9: note = Any amino acid
WESPXELXXYI

SEQ ID NO: 5695 - protein, 8 aa, unidentified
  REGION 1..8: note = Description of Unknown: uncultivated organism
  REGION 1..8: note = MG22 motif 2
VEQVSLET

SEQ ID NO: 5696 - protein, 8 aa, unidentified
  REGION 1..8: note = Description of Unknown: uncultivated organism
  REGION 1..8: note = MG22 motif 3
LRVVRDLW

SEQ ID NO: 5697 - protein, 8 aa, unidentified
  REGION 1..8: note = Description of Unknown: uncultivated organism
  REGION 1..8: note = MG22 motif 4
LRVVHDLW

SEQ ID NO: 5698 - protein, 8 aa, unidentified
  REGION 1..8: note = Description of Unknown: uncultivated organism
  REGION 1..8: note = MG22 motif 5
YGAYSKRA

SEQ ID NO: 5699 - protein, 8 aa, unidentified
  REGION 1..8: note = Description of Unknown: uncultivated organism
  REGION 1..8: note = MG22 motif 6
YGAYSDKA

SEQ ID NO: 5700 - protein, 14 aa, unidentified
  REGION 1..14: note = Description of Unknown: uncultivated organism
  REGION 1..14: note = MG23 motif 1
VLKKYDAYDEMFRV

SEQ ID NO: 5701 - protein, 14 aa, unidentified
  REGION 1..14: note = Description of Unknown: uncultivated organism
  REGION 1..14: note = MG23 motif 2
VLKKYNGYDKMFRV

SEQ ID NO: 5702 - protein, 14 aa, unidentified
  REGION 1..14: note = Description of Unknown: uncultivated organism
  REGION 1..14: note = MG23 motif 3
VLKKYDEYDKMFRM

SEQ ID NO: 5703 - protein, 8 aa, unidentified
  REGION 1..8: note = Description of Unknown: uncultivated organism
  REGION 1..8: note = MG23 motif 4
  MOD_RES 6: note = Any amino acid
GKDLWXSR

SEQ ID NO: 5704 - protein, 8 aa, unidentified
  REGION 1..8: note = Description of Unknown: uncultivated organism
  REGION 1..8: note = MG23 motif 5
  MOD_RES 6: note = Any amino acid
GKDFWXSR

SEQ ID NO: 5705 - protein, 16 aa, unidentified
  REGION 1..16: note = Description of Unknown: uncultivated organism
  REGION 1..16: note = MG23 motif 6
  MOD_RES 12: note = Any amino acid
  MOD_RES 14: note = Any amino acid
MVLNELNNLKIXGXKP

SEQ ID NO: 5706 - protein, 16 aa, unidentified
  REGION 1..16: note = Description of Unknown: uncultivated organism
  REGION 1..16: note = MG23 motif 7
  MOD_RES 12: note = Any amino acid
  MOD_RES 14: note = Any amino acid
TVLNELNNLKIXGXKP

SEQ ID NO: 5707 - protein, 16 aa, unidentified
  REGION 1..16: note = Description of Unknown: uncultivated organism
  REGION 1..16: note = MG23 motif 8
  MOD_RES 12: note = Any amino acid
MVLNELNNLRIXGKKP

SEQ ID NO: 5708 - protein, 12 aa, unidentified
  REGION 1..12: note = Description of Unknown: uncultivated organism
  REGION 1..12: note = MG23 motif 9
  MOD_RES 2: note = Any amino acid
  MOD_RES 10: note = Any amino acid
VXVKQGIYEXLF

SEQ ID NO: 5709 - protein, 12 aa, unidentified
  REGION 1..12: note = Description of Unknown: uncultivated organism
  REGION 1..12: note = MG23 motif 10
  MOD_RES 2: note = Any amino acid
  MOD_RES 10: note = Any amino acid
VXVKQDIYEXLF

SEQ ID NO: 5710 - protein, 13 aa, unidentified
  REGION 1..13: note = Description of Unknown: uncultivated organism
  REGION 1..13: note = MG23 motif 11
  MOD_RES 7..8: note = Any amino acid
  MOD_RES 10..11: note = Any amino acid
GKRVTLXXLXXYL

SEQ ID NO: 5711 - protein, 13 aa, unidentified
  REGION 1..13: note = Description of Unknown: uncultivated organism
  REGION 1..13: note = MG23 motif 12
  MOD_RES 7..8: note = Any amino acid
  MOD_RES 10..11: note = Any amino acid
GKKVTLXXLXXYL

SEQ ID NO: 5712 - protein, 8 aa, unidentified
  REGION 1..8: note = Description of Unknown: uncultivated organism
  REGION 1..8: note = MG23 motif 13
  MOD_RES 4: note = Any amino acid
FTDXNQAM

SEQ ID NO: 5713 - protein, 13 aa, unidentified
  REGION 1..13: note = Description of Unknown: uncultivated organism
  REGION 1..13: note = MG23 motif 14
  MOD_RES 7: note = Any amino acid
  MOD_RES 10: note = Any amino acid
WGTVYGXDKXFLK

SEQ ID NO: 5714 - protein, 13 aa, unidentified
  REGION 1..13: note = Description of Unknown: uncultivated organism
  REGION 1..13: note = MG23 motif 15
  MOD_RES 7: note = Any amino acid
  MOD_RES 10: note = Any amino acid
WGTIYGXDKXFLK

SEQ ID NO: 5715 - protein, 13 aa, unidentified
  REGION 1..13: note = Description of Unknown: uncultivated organism
  REGION 1..13: note = MG23 motif 16
  MOD_RES 7: note = Any amino acid
  MOD_RES 10: note = Any amino acid
WATIYGXDKXFLK

SEQ ID NO: 5716 - protein, 8 aa, unidentified
  REGION 1..8: note = Description of Unknown: uncultivated organism
  REGION 1..8: note = MG23 motif 17
ALELLGDE

SEQ ID NO: 5717 - protein, 8 aa, unidentified
  REGION 1..8: note = Description of Unknown: uncultivated organism
  REGION 1..8: note = MG23 motif 18
AKDILGDE

SEQ ID NO: 5718 - protein, 998 aa, unidentified
  REGION 1..998: note = Description of Unknown: uncultivated organism
  REGION 1..998: note = MG40-1 effector
MKKKIFGFDLGIASIGWAVVEFDNEYFDPETGEVVEGKIVKSGVRCFPVAENPKDGSSLAAPRREKRLARRICRRKARRMESIKRLFVAKNLVSDLRELNDLYASQKGGDVWNLRIKGLSEKLSKEELLRVLTHLAKHRGFKSYRKAVEENDAERGRVLKAINENKKLLSKDNTLAQVIVERAGKTGKKRNYTESDAKGMAKAIYNNSIPRNEIERELNLIYAEQKQYGIFSEDLFEDFKKIAFRYRPLGSVADMVGNCTFEKGEKRAPKEAPSSEFFVAWGKINNMAVYENAQKRFLSMEEKKALFELLKTTPKVKYQTIAKKIFVGKDIQFADVNYNLIRKKSKDGSSKEVNPEDAVFYEMKGWHKLKSLFEKDAWSEISKDISLLDRVVNVVVCEKNDENIIKGLKHINVPEKYIETFSSLTTDKFINLSLNALYKILPYMVQGMKYNEACEKAGYDFREKTDKLVEKKGVLLSVIPAEKQTKVPVVNRTISQFRKVYNAMVRQFGAPDQINIETGRELKKNYEERRKIINKNKENEQERKEAEEELRQENIKETSKNIWKYRLYQEQDGKCIYSGKSIDLRRLDEEGYLDVDHIIPYSRSLDDSFNNKVLCLSSENRMKGNKTPFEYIQNKDDWEAFEARVNLLRNNRKKENLLNKNFNDRELEFKERNANDNNYIAKYIKQYLEDGLDFSSSNRQDIKNRIQMRTGSLTSYLRHCWGLHKDRNENDRHHAQDAIVIACATQGMVKYLSTVSGLWENKWQVAQLKDNGEAWYKSLKYKFLEPWNGFREDVKQSLDEIFVSRPPRKSATGEIHQETIRSLNPKHKNYNKKDIKSGILVRGGLANNGSMLRTDVFVKKNKKGKDEFYLVPIYLSDMGKELPSKAIVPLKFEDEWLQIDDNFSFKFSLYMDDLVKVKKGEKEIFGYFKGTGRTTGSITIEAPDRSIITPSIGVKTQDAFKKYSVDPLGNYTEVKHESRIPLTLIKSNAQRYKEQQKG

SEQ ID NO: 5719 - protein, 987 aa, unidentified
  REGION 1..987: note = Description of Unknown: uncultivated organism
  REGION 1..987: note = MG40-2 effector
MKKKKIFGFDLGIASIGWAVVEFDNEYFNPETGEVIEGRILGAGVRTFPQAENHKDGSSLAQPRREHRLARRLCRRKARRLEGIKKMFIAKGLFNSMDDYKSLFEEKGREDVWNLRIEALSRALSKKELMRVLIHLAKHRGFKSYRKAIEEKDEEGGKMLKAIGANKALLSESKTLAQIIVERAGERGKKRNYTHKNDKGKDETVYINSIPRTEIERELDLIYQNQKQYGIFTEDLYNDFKNIAFRFKPFDAVGDMVGYCSFEKNEKRAPKNAPSAEIFVALSKINNLTVYENNTKRFLDDDERANLLQLLKTTQKVKYSSIAKKVFKGKEIKFTDINYAISAKEAKPSNPEDKLFYEMKGWHNIKSYLSEDEWEKYSQNLPLLDNIVTVIATEKNDVKITEALKKLSLDDVIITKFLQLDFDKFINLSLRALYKILPYMEKGLTYNKACASCGYDFKNVAEIVEKGKDGLLLSIPQDKQTTVPVVNRTVSQFRKVYNAMVRHFGIPDQINIETGRELKKSFDERQKIIRKNKENEEERKEAFAKLNENNIQETSTNVLKWRLYQEQDGKCIYSGKPIDLNRLDEVGYLEIDHILPYSRSLDNSYNNKVLCLSAENQMKSNKTPFEYLGGDEEVWNAFCCRINSMQAMRSRKKGNLLVKNYNDRELEFRERNANDNSYISRFVKKYLEDGVDFSQSTRQDIKCRVQTRTGFLTDYLRHCWGLQKNRDESDTHHAQDAVVIACATQEMVTYLSSVSNFKENKWFLTQQKGEAWYKSLKHKFDEPWSGFRNDVATTLEGIFVSRPPRKNATGEIHEETIRPLNPKHKNYNAQKIKSGMSVRGGWASNGGFLRTDVFSKKNKKGKEEFYLVPIYLSDMGKDLPNKAIVPLKDEKEWLTLDDSFEFKFSLYMDDLVKVIKGNKEIFGYFKGTGRTTGSITIESHDRSIITPSIGVKTQDNIKKYQVDPLGNFTEIKGEKRLSLKSGKNHKE

SEQ ID NO: 5720 - protein, 983 aa, unidentified
  REGION 1..983: note = Description of Unknown: uncultivated organism
  REGION 1..983: note = MG40-3 effector
MSLIFGFDLGIASIGWAAVKISDPTASATDAAAPDKRPAGEILGAGVRCFDQAQNAADRRMVRGARRRIRHRAQRMREIRAILRKYNLIDIPEPKSNGKNNFYLNRDTDINIWQLRAVDAFTRKLTPRETGRILYHLAKHRGYDDITYPVSADTKSEKADNADAKEELKAIGEIKRNLAKLHNENPNQTMCQMLYAINHSQHIKMRNGRKSGTKIAKDGTQKTELQSPYSNSIPRSQIKREAEMILRAQRDFGNDFSNVFTKWFDVAFRQRKFNESASPLAKSIEEMRGKCPFTNEPVAPKESPTAQMFVALTKCRQNDFTVEETKKIIDELYKKKTGLKYADVRELLKWDDDRRFKTLNYSRTYDKENKILIEPDIKKIEDRKFYAFTGWHKLAKYTTDIATMDKIFDIIATQKTPENIERAVSEILPEHAAAIAQITSSEFIKLSISALQKIIPEMEKGKKYNEAVAAGLNQDFRAQNVSYINRDDGASAGYLHQINWCLLGNRITSPVAKRTLGQLRKVYNAMVYRFGSPDRIHLEIGRELKNSPDDIARMKREQERNRQATADARKEYGKNYFKYKLYMEQGGKCPYCNATLVAGDWAAYEIDHILPYSRSLDNSQSNKVLVCHECNQRKGSKTPYEFLTSEQFFDMTVRARALHNPAKFKKLTNTDLPQSNDDQNGFIERNANDNATIAKFAAEYLEYGIDWSASDDIKKRVLVRTGSLTDYLRHQWGLVKNRDESDRHHAQDAIVIACATQGMVKYLSTLSARFENKYALIQKNGQAWYNALKTSIQEPWDGFRTDVISCLGNVIVSRPPRCNATGAAHDETIYADPKSYRSKRGMNKNRDKGSLEIRHGRAVRGNMFRFDIWRNARGKYVCVPIFVTDTKGKDDDAFKIPDGEFVCSLHKDDYVRLTTADGMYEGYITQMDHGRNFILYRQDNSKNIVVTKAVGKCTNIEKFAVSLLGTPKPIKLPEQRTPVVKRK

SEQ ID NO: 5721 - protein, 980 aa, unidentified
  REGION 1..980: note = Description of Unknown: uncultivated organism
  REGION 1..980: note = MG40-4 effector
MSLIFGFDLGIASIGWAAVRMSDPTASTTDASAPDSRPVGEIVGAGVRCFDQAQNAADRRTARGARRRIRHRAQRMREIRDILRQYHLIDIPEPKSDGQNNFYLNRDTDINIWQLRAVDAFTRKLTPRETGRILYHLAKHRGYDDITYPVPAGAKSEKADDAESKEELKAIGAIKDNLAKLQRENPDQTMCQMLYATEHAQMRNGRKSVVKIAKDGTQKTEVQSTYSSSIPRSEIKREAEMILHAQRDFGNDFSDAFEKWWAVACRQRKFNESASPLAKSIAEMRGKCPFTNEPVAPKESPTAQKFVALTKCRQNDFTVAETQTVIDELYKKKTGLKYADVRNLLKWDDDKQFKTLNYSRIYDKENKVWIEPDIKKIECQKFYAFTGWHKLAKYTTDIDTMDKIFDVIATQKTPENIERAVSEILPEHAAAIAQITSSEFIKLSISALQKIIPEMENGKKYNEAVASGLNKDFRAQNVSYINRDDGAPAGHLHQINWTLLGNRITSPVAKRTLVQLRKVYNAMVYRFGAPDRIHLEIGRELKNSPDDIARMNREQERNRQATEEARKEYGKNYFKYKLYMEQGGKCPYCNAVLAAGDWGAYEIDHILPYSRSLDNSQSNRVLVCHECNQRKGSKTPYEFLTSEQFYDMTVRARALHNPAKFKKLTNTDLPKCDAEQNGFIERNANDNATIAKFATEYLEYGIDWPASDDIKKRVLVRTGSLTDYLRHQWGLVKNRDESDKHHAQDAIVIACATQGMVKYLSTLSARFENKYALIQKYGQAWYTALKTSIQEPWNGFRTDVISCLNDIIVSRPPRCNATGAAHDETIYADPKSYRSKRGLNKNRDKGSLEIRHGRAVRGDMFRFDIWRNAHGKYVCVPIFVTDTKGKDDDVFKVPDGEFVCSLHKDDYVRLTAADGVYEGYITKMDHGTNFILYRQDNNRTQVVKKSVGKCTNIEKFAVSLLGTPKPIKLPEQRTPVVKRK

SEQ ID NO: 5722 - protein, 997 aa, unidentified
  REGION 1..997: note = Description of Unknown: uncultivated organism
  REGION 1..997: note = MG40-5 effector
MSLIFGFDLGIASIGWAAVKMSDPTASDTDAAAPDNRPVGEILGAGVRCFDQAQNAADRRVARGARRRIRHRAQRMRDIRKILRQYNLIDIPEPKFNGQNNFYLNRDTDINIWQLRAVDAFTRKLTPRETGRILYHLAKHRGYDDITYPVLTGAVPEKADDAEAKEELKAIGAIKDNFAKLHNENPDQTMCQMLYATEHGQMRNGRKSVIKITKDGTQRTEEQSSYSNSIPRSEIKREAEMILHAQCGFGNDFSDVFKEWCVVAFHQLKFNESKSPLAKSIEKMRGKCPFTNKPVAPKESPTAQMFVALTKCRQNGFTVAETNAIIDALYKKKTGLKYADVRKLLKWDDDSQFKTLNYSRTYDKENKKWIEPDVKKIENSKFYAFTGWHKLAKYTTDVATMDKIFDIIVTQKTPENIERAVSGILPEHAAAIAQITSSEFIKLSITALQKIIPEMAAGKKYNEAVADGLGKDFRVQNVSYIDRDDGVSAGCLHQINWNALGNRITSPVAKRTLGQLRKVYNAMVYRFGAPDRIHLEIGRELKNSPDDIARMNREQERNRQATEEARKEYGKNYFKYKLYMEQGGKCPYCGATLVAGDWAAYEIDHILPYSRSLDNSQSNKVLVCHECNQRKGNKTPYEFLTTEQFHDMAVRARALHNPAKFKKLTNTELPQSSDEQNGFIERNANDNATIARFATEYLEYGIDWPESDNIKKRVLVRTGSLTDYLRHQWGLVKNRDESDKHHAQDAIVIACATQGMVKYLSTLSARFENKYALIEKYGQAWYNVLKTSVQEPWAGFRTAVFSLLDNIIVSRPPRCNATGAAHKETIYANPKSYRSKRGLNKNRDKGSMKIRHGRVERGDMFRFDIWRDARGKYVCVPIFVADTKGKDDNNFKVPDGEFICSLHKDDYVRIYTSNQVIEGYISQMQEVIHGDKIYRYLALYTHDNHKTIVCKDDKSKAVPEIFRANVSDATNIEKFAMSLLGTPKPIKLPEQRTPVVK

SEQ ID NO: 5723 - protein, 978 aa, unidentified
  REGION 1..978: note = Description of Unknown: uncultivated organism
  REGION 1..978: note = MG40-6 effector
MSLIFGFDLGIASIGWAAVKMSDPTASDTDAAAPDNRPVGEILGAGVRCFDQAQNAVDRRVARGARRRIRHRAQRMRDIRKILRQYNLIDIPEPKFNGQNNFYLNRDTDINIWQLRAVDAFTRKLTPRETGRILYHLAKHRGYDDITYPVLTGVVPEKADDAETKEELKAIGAIKDNFAKLHNENPDQTMCQMLYATEHGQMRNGRKSVIKITKDGTQRTEEQSSYSNSIPRSEIKREAEMILHAQCGFGNDFSDVFKEWCVVAFHQLKFNESKSPLAKSIEKMRGKCPFTNKPVAPKESPTAQMFVALTKCRQNGFTVAETNAIIDALYKKKTGLKYADVRKLLKWDDDSQFKTLNYSRTYDKENKKWIEPDVKKIENSKFYAFTGWHKLAKYTTDVATMDKIFDIIVTQKTPENIERAVSGILPEHAAAIAQITSSEFIKLSITALQKIIPEMAAGKKYNEAVADGLGKDFRVQNVSYIDRDDGVSAGCLHQINWNALGNRITSPVAKRTLGQLRKVYNAMVYRFGAPDRIHLEIGRELKNSPDDIARMNREQERNRQATEEARKEYGKNYFKYKLYMEQGGKCPYCGATLVAGDWAAYEIDHILPYSRSLDNSQSNKVLVCHECNQRKGNKTPYEFLTTEQFHDMAVRARALHNPAKFKKLTNTELPQSSDEQNGFIERNANDNATIARFATEYLEYGIDWPESDNIKKRVLVRTGSLTDYLRHQWGLVKNRDESDKHHAQDAIVIACATQGMVKYLSTLSARFENKYALIEKYGQAWYNVLKTSVQEPWAGFRTAVFALLDNIIVSRPPRCNATGAAHKETIYANPKSYRSKRGLNKNRDKGSMKIRHGRVERGDMFRFDIWRDARGKYMCVPIFVADTKGKDDNNFKVPDSEFICSLHKDDYVRLTTADGVYEGYITQMDHGTNFILYRQDNSQIQVVKKSVGKCTNIEKFAMSLLGTPKPIKLPEQRTPVVK

SEQ ID NO: 5724 - protein, 984 aa, unidentified
  REGION 1..984: note = Description of Unknown: uncultivated organism
  REGION 1..984: note = MG40-7 effector
MGWAVVDFDDVGDPENEIYPSGEIKKSGVRCFPIAENPKDGSSLAEPRRQKRLMRRLCRRKARRMKGIKALFVANHLVDESELSQENKENIYRVKGNPDVWKLRVKALAEKLTIVEFLRVLTHLAKHRGFKSYRIAAEKADAENGKVLEAIKANKVLLADGKTLAQMLVEKGGKKRNRQKIIIKNGKEGTQPNYEDSIPRDEIIRETDLIFETQRRLGLSFATEKFQSDFKDIAFRYRSVAGIEKMLGSCLFEKEENGKPCKRAPKAAPSAEFFVAWTKINNCAVFEKGEKRFLTAEERLAIFNLLKEQKEVKYAAIRKKIFAGRDDITFADVEYNPKPIVNKRTGEIKEPKKPEDNPFFALKGYHALKNVIDISAYPIEILDQIVSVIATQKNDEAIAGSLKNIGLSETEIEKLQGLTFKTFIKLSLKALYKILPEMQAGKKYNEACKAVGYDFQTTGESFTKEKGKFLPPIPQDMMTTVPAVNRALAQFRKVYNAMVREFGTPDQINIELARDVYNDHDERQEIVKKQQEYAEEKENAKQLAYEKLGLSKISGTQLLKFRLYEQQNGKCVYSGRTLDINRLIDQDYCDVDHIIPYSRSLDNSLHNKVLCLSRENREKTDKTPFEYFRDSKTPAAWEEFKIRVCSMKALSKSKKVRLLAQDFKDREEEFRSRNINDTRYMSRYLMKYLDDCIDFSGSQTDVKDHVQSRNGALTDYLRHQWGLTKKRAENDRHHAQDAIVIACATNGYTQYLARLSKIFENKQAYAAKHGEAWYKAFKAHLKTPWETFYEDVQKSLSEIFVSRPPRKNATGEVHQETIRTLNPDKKGYSEKDVKSGVKVRGGLANNGNMLRVDVFSKKNAKGKEQFYLVPIYLADMVKPEMPNKAIVANKPESDWPVMDDTFIFKFSLFKDDVVKVDDGVFGYYVGTHRGTSAITIEAPDRSETWAGLGARNLKYIKKYQVDPLGRYVEVKSETRVPLNAKQRG

SEQ ID NO: 5725 - protein, 1004 aa, unidentified
  REGION 1..1004: note = Description of Unknown: uncultivated organism
  REGION 1..1004: note = MG40-8 effector
MKKKIFGFDLGIASIGWAVVEFDNEYFNPETGEVIAGKIIRSGVRCFPVAENPKDGSSLAVPRREKRLARRICRRRARRLEGLKKLFVIKHLAENLQEIEELYRLQTGGDVWELRIKGLTEKLSKEELLRVLTHLAKHRGFKSYRKEAEKNDAEGEKILKAINENKQQLEGNKTLAQLIVGRAGKCGKKRNYTELDAKGVEKAVYNNSIPRDEIERELALIYENQKQYGIFSKDLFDDFRKIAFRYRPIGSVADMVGYCTFEKGEKRAPKEAPSSEFFVAWGKINNLAVYENGQKRFLSQEEKLALFELLKSTQKVKYQMISKKIFPQRDIQFADINYNQTAKKAKDGSIKKINPEDVLFYEMKGWHKLKSLFEKDEWAELILNIPLLDEVVNIIACEKNDENITKGLKAINIPEKYFEKFTALTTDKFINLSLKALYNLVPFMKQGLKYNEACEKAGYDFKENNDKLVEKRSVLLEVIPVEKQTKIPVVNRTVAQFRKVYNAMVRQFGAPDQINIETGRELKKSYDERRKIIAKNKENEQERNEAREALENENLKGNSKNILKYRLYQEQDGKCIYSGNPIDLYRLDEEGYLDVDHIIPYSRSLDDSLNNKVLCLSSENRKKGNRTPFEYILDEKDWEMFESRVKLLRNNRKKENLLNMNFVDRELEFRERNANDNNYISRYIKKYLEDGIDFSSSNCQNIKNRIQMRTGSLTSYLRHCWGLKKNRNENDRHHAQDAIVIACATQGMVQYLSAVSGLWENKWEVAQAKENGEAWYKSLKYKFSEPWHGFRDEVEKSLQDIFVSRPPRKSASGEIHQETIRSLNPKHKNYSEKDIKSGIPVRGGLANNGSMLRTDVFVKKNKKGKDEFYLVPIYLSDMRKELPNKAVVPLKFEDEWVQLDDSYTFKFSLYMDDLVKVKKGDNEAIFGYFKGTNRCTGAITIEAADRSKKYDGVGVKTQDSFRKYSVDPLGDITEIKHETRMPLTHVKPNAQGYKKKQEKRLLKG

SEQ ID NO: 5726 - protein, 1014 aa, unidentified
  REGION 1..1014: note = Description of Unknown: uncultivated organism
  REGION 1..1014: note = MG40-9 effector
MKKRIFGFDLGIASIGWAIVEMEDERKNPSDGFLTEGKIVKSGVRIFNVAENPKNGESLAKPRRDKRLSRRLCRRKARRKEAIRNLLIAKGLIGKEDIDRVFMQQVGGDVWDLRVKGLSKKLEKEELARVIFHLGKHRGFKSYRKAEEENDEENGKVLKAIKENREALGKDETKTLAQVIVERAKNSEDKHKRNYQKIIDKNGKKTTELVYLNSIPRSEIKRELKLIYENQKQYGFFTEDLYVALAGKGKEPKDDDNSENGIMFRHRPVGAIDEMVGYCRFETKEKRAPKEAPSSELFVALSKINNMSVYEDNEKRFLNNDERSLLLDLLKKTKTVKYSTISSKIFKEKNIKFADINYRKTVKKDKDGKETKVNPEDEKFYSMSGWHKLKTALGDAFDKYQENIHLLDKIVEITAMYKNDELIQKKFEELNIDKKDAELFKELTFKQFINLSLKALYKIVPYMEQGDKYNEACEKAGYDFRDSGEKLVANKGSVLEVIKPEMMTTVPVVNRAVAQFRKVYNAMVRRYGEPDQINLEVGRELKKSWDERKKTEKMQKENALKREQAKKEIEENEAEATSKNILKYRLYQQQDGKCIYSGKVIDINRLYEDGYAEIDHIIPYSRSLDNSQNNKVLCLSEENRMKGNKTPYEYMKDSGRWHDFKVMVGSLYGIGKRKKDNLLNEGFKNREEEFRERNANDNSHIARYVKQYLNDGISFENSSYKNIKNRIQSRSGSLTDYLRHQWGLEKVRSAGDKHHAQDAIVIACATQGMVQYLSGMAGIFENKYALRGENGEAWYNAIKSNVQEPWKGFRNDVEESLSKVFVSRAVRKNASGEIHEETIRTLNPKHKNYNESDVKSGMHIRGGLANNGVMLRTDVFSKKNKKGKNEFYLVPIYLGDMANDELPNKAIIAGKNEEEWMKIDETCTFLFSLYKNDLIRIRKKEVDIFGYFGGTDRSLGRIIIQEHDRSKDEIRACVKTQDIFKKYQVDPLGFYTEVKTEKRMPLKIKKKTKKCRGE

SEQ ID NO: 5727 - protein, 1010 aa, unidentified
  REGION 1..1010: note = Description of Unknown: uncultivated organism
  REGION 1..1010: note = MG40-10 effector
MKKRVFGFDVGISSLGWAVIDMDDDKDPEKQEEITGEIIAAGVRTFPEAENPKDGKSLAMPRRQKRLARRVCRRKALRKKDLKKLFVEKGLVGETDFVRKNVPLADVWDLRVQGLSRRLSGEELARVLLHLAKHRGFKSYRKAQEKEEEGGKVLEALSKNKALLSENENKTLAQIFVERGGKKRNFCRTVTKNGTEKTEACFDNLFTREEIIREAGLIFDRQRTFGSEFASPEFEEAFGEIAFRHREVDVQGVEKMLGVCPFEKDEKRAPKEAPSAEFFVALGKINSMSVLEGGRKRPLTEGERAALFDLLKARKKVTYRDIRQKVFNSPSEDDFRFSDVEYNPRPKYDKKTKELIVNKKAPEEKEFYSLKGYHALKGLIGEAYDIPTQDKIVSVIAIQKNDKNIEGQLKELGIHPDDIETLKGVSFSKFIGLSLKAVYRLLPEMEAGKKYNEACKAVGYDFKSTGEPFSREKGPFLPPIPQKLLTRVPVVNRAVSQFRKVYNAMVRTYGTPDQINVEMGRDIYNNAQDRKKIQKAQEEFRELKDAARQKAEERLGYGNVSLKVLLKFRLYEEQDGKSVYSGRSIDLDRLAKEPDYCDVDHIIPYSRSLDDSLNNKVLCFSSENREKSNRTPLEYLPVESHADFIGRVMSMKGIKSAKRDRLLIENFSAKEAEFRERNINDTRYMAKYLIKYLDDCIDFSGSSAILKDRVQSRSGGLTDFLRYQWGLKKDRSENDLHHAQDAIVIACATNGYTKYLAHLSKIFENKQRYAEKYGEAWYKAFKRHLKAPWDGFYEDVQKALAKIFVSRSPRKNATGELHKETICTLKPSSGKFKEENVKSGFKIRGGIAGNGEMLRVDVFSKKNKRGKEEYYLVPVYLKDMAAKVLPNKAVVAGKPEEEWLEMDESYVFKFSLFPDDLCFVQKGEKIIFGYYKGANRATASITLEGHDRSFMKEGIGVKTQDRIKKFQVDPLGRYVEVKSEKRLPLKPKSAEQRRRDRWKNDFYKKHPDTK

SEQ ID NO: 5728 - protein, 1010 aa, unidentified
  REGION 1..1010: note = Description of Unknown: uncultivated organism
  REGION 1..1010: note = MG40-11 effector
MKKRVFGFDVGISSLGWAVVDIDDDKDPEKQEEITGEIIAAGVRTFPEAENPKDGKSLAMPRRQKRLARRVCRRKALRKKDLKKLFVEKGLVGETDFVRKNVPLADVWDLRVQGLSRRLSGEELARVLLHLAKHRGFKSYRKAQEKEEEGGKVLEALSKNKALLSENENKTLAQIFVERGGKKRNFCRTVTKNGTEKTEACFDNLFTREEIIREAGLIFDRQRTFGSEFASPEFEEAFGEIAFRHREVDVQGVEKMLGVCPFEKDEKRAPKEAPSAEFFVALGKINSMSVLEGGRKRPLTEGERAALFDLLKARKKVTYRDIRQKVFNSPSEDDFRFSDVEYNPRPKYDKKTKELIVNKKAPEEKEFYSLKGYHALKGLIGEAYDIPTQDKIVSVIAIQKNDKNIEGQLKELGIHPDDIETLKGVSFSKFIGLSLKAVYRLLPEMEAGKKYNEACKAVGYDFKSTGEPFSREKGRFLPPIPQKLLTRVPVVNRAVSQFRKVYNAMVRAYGTPDQINVEMGRDIYNNAQDRKKIQKAQEEFRELKDAARQKAEERLGYGNVSAKVLLKFRLYEEQDGKSVYSGRSIDLHRLANEPDYCDVDHIIPYSRCLDDSLNNKVLCFSSENREKSNRTPLEYLPAESRADFIGRVMSMKGIKSAKRDRLLIENFSAKEAEFRERNINDTRYMAKYLIKYLDDCIDFSGSSAILKDRVQSRSGGLTDFLRYQWGLKKDRSENDLHHAQDAIVIACATNGYTKYLAHLSKIFENKQRYAEKYGEAWYKAFKRHLKAPWDGFYEDVQKALAKIFVSRSPRKNATGEIHKETIYTLKPASGKFKEENVKSGFKIRGGIAGNGEMLRVDVFSKKNKRGKEQYYLVPVYLKDMAAKVLPNKAVVAGKPEEEWLEMDESYVFKFSLFPDDLCFVQKGEKIIFGYYKGANRATASITLEGHDRSFMKEGIGVKTQDRIKKFQVDPLGRYVEVKSEKRLPLKPKSAEQRRRDRWKNDFYKKHPDTK

SEQ ID NO: 5729 - protein, 1001 aa, unidentified
  REGION 1..1001: note = Description of Unknown: uncultivated organism
  REGION 1..1001: note = MG40-12 effector
MKRKVFGFDLGIASIGWSAIEFDNEYFNIDTGEIVEGKILGAGVRTFPVAENPKDGSSLAMPRRSCRAARRLCRRKARRLEGIKKMFVAKGLLNNLDDFTYLFNEKGREDVWNLRVEALKRALSKEELLRVLIHLAKHRGFKSYRKAAEEKDEEGGKVLKAINANKSLLSETKTLAQIIVERAGINGKKRNYKITNEKGKEETVYINSIPRTEIERELDLIFQKQEQYGIFKKDIYQDFKNIAFRFKPFASVGNMVGNCSFEKNEKRASKNAPSAELFVALSKINNLTIYENNAKRFLNTDERLSLLELLKTIQKVKYSTIAKKIFKNKEIKFSDINYAISEKDAKPSNPEDKLFYEMKGWHKIKAILSENEWNEYSHNLPLLDKIVNIIACEKNDEGIVKGLNTLNLSAEIVSKFLQLDFDKFINLSLKALYKILPYMENGMTYDKACNACGYDFKSTVSIVEKGKDGLLKPIPQENQTTVPVVNRTVSQFRKVYNAMVRRYGVPDQINIETGRELKKSFDERKKIEKKNKDNQKEREEVLEKLQQSNIRETSTNVLKWRLYKEQDGKCIYSGKPIDINRLDETGYLEIDHILPYSRSLDDSYDNKVLCFSVENQKKSNKTPFEYLGNYVETWDDFCCRVNSMHAMRSHKKANLLIKNYNDKEVEFRERNANDNSYISRFVKQYLEDGVDFSNSFRQDIKNRIQTRTGYLTDYLRHCWGLKKDRDENDRHHAQDAIVIACATQDMVKYLSTVSNFFENKWLLTQEKGEAWYKSLKHKFKEPWSGFREDIAHTLDNIFVSRPPRKKATGSAHKDTISSKTNNISRLDVRKGEAIKEKMFRCDVYLLDKQYKIVPIYAVDLVSRNFHHYVQPYEKIGNEFLEAKEENFLFSLYKDDYIKITTETDVFQGYFNQYNAQSGQIYLGSMDNSKIFKIRDKNEVSGYHLDKEKKIAINTCIKFEKLQIEILGDIYEVKKESERFFQKMKSNAQKYSEKKTAKQIER

SEQ ID NO: 5730 - protein, 1051 aa, unidentified
  REGION 1..1051: note = Description of Unknown: uncultivated organism
  REGION 1..1051: note = MG40-13 effector
MQKIIFGYDLGIASIGWAAIKFDDESFNPDTGEVFEGRILGAGTRCFPVAENPKDGTSLAEPRRMMRLSRRACRRKARRLLGLKQLFVKKGLAESLERIKKIYSQKGKVDVWTLRAEKAFNEELSKDELIRVLIHLAKHRGFKSYRKAVEEQDKEGGKVLSAIKANKALLTDNKTLAQIIVEQAGISGKKRNRAIKDSKGKVKEIIYNNSISRDEIEREVECIFDAQKKYGIFTEELLEDYKNIAFRHRPVGSIADMVGVCRFEKGEKRAPKEAPSSELFVALTKINNLSVIENGNMRQVTDEERKRILEVLKTTKKVTYKTLKSKVFGKDISIKGDTDTKNLIFYEMKGWHQLKSQFDKEQWAELEKDIPLLNKVVEIIACEKNDEKIKEELKKVNISDENIKVFCGYNFSKFIHLSLKAVDKIIPFMMQGDSYDKACEKAGYDFQENVNKLVSKKSKFLEPIPQDQMTTVPVVNRTIAQFRKVYNAMVRRFGVPDQINIETGRDLKKNHDERRKIEQEINQHREERSISADELKNMGMADNAINILKYRLYQEQDGKCIYSGHSIDLNRLDETGYLDVDHIVPYSRSLDNSQTNKVLCLSSENRKKGNKTPYEYFKDLKTMQQWDEFVARVNLLRNYKKKEKLLIENYEERELKFKERNANDNSYIATFVKRYCEEGIDFSLSSRQDIKNRVQVRNGALTDYLRHQWGLQKDRNESDLHHAQDAIVIACATQGMVEKLSRLSSIFENKEKYRERKARELGHEEAEAWYKYIKSTVREPWCNFRNEVLKTLKNIFVSRPPRKKATGSAHKETIYSKRLGKGSLPIRGGMAEKENMFRLDVFKKDNQYYIVPIYVVDLVKKDGFQDAPQPYKYVDGKLVLIDETYQFTFSLFKDDYVEVFTEGEVFKGYINQYSAQTGQLYLGSVDNSTCYKIKTDTFIVDDKILLPNQEHDCVATVKLFDKMKQKMIVACNGKDLELDASLKLNKKGEETKNIQTLIPYIKLAREKKISLPVMQNLKKYQVSPLGDIHEVKQETRLPLSIKKNKGKKANR

SEQ ID NO: 5731 - protein, 1051 aa, unidentified
  REGION 1..1051: note = Description of Unknown: uncultivated organism
  REGION 1..1051: note = MG40-14 effector
MQKIIFGYDLGIASIGWAAIKFDDESFNPDTGEVFEGRILGAGTRCFPVAENPKDGTSLAEPRRMMRLSRRACRRKARRLLGLKQLFVKKGLAESLETIEKIYSQKGKVDVWTLRAEKAFNEELSKDELIRVLIHLAKHRGFKSYRKAVEEQDKEGGKVLSAIKANKALLTDNKTLAQIIVEQAGISGKKRNRAIKDSKGKVKEIIYNNSISRDEIEREVECIFDAQKKYGIFTEELLEDYKNIAFRHRPVGSIADMVGDCRFEKGEKRAPKEAPSSELFVALTKINNLSVIENGNMRQVTDEERKRILEVLKTTKKVTYKTLKSKVFGKDISIKGDTDTKDLIFYEMKGWHQLKSQFDKEQWAELEKDIPLLNKVVEIIACEKNDEKIKEELKKVNISDENIKVFCGYNFSKFIHLSLKAVDKIIPFMMQGDSYDKACEKAGYDFQENVNKLVSKKSKFLEPIPQDQMTTVPVVNRTIAQFRKVYNAMVRRFGVPDQINIETGRDLKKNHDERRKIEQEINQHREERSISADELKNMGMADNAINILKYRLYQEQDGKCIYSGHSIDLNRLDETGYLDVDHIVPYSRSLDNSQTNKVLCLSSENRKKGNKTPYEYFKDLKTMQQWDEFVARVNLLRNYKKKEKLLIENYEERELKFKERNANDNSYIATFVKRYCEEGIDFSLSSRQDIKNRVQVRNGALTDYLRHQWGLQKDRNESDLHHAQDAIVIACATQGMVEKLSRLSSIFENKEKFRERKARELGHEEAEAWYKYIKSTVREPWCNFRNEVLETLKNIFVSRPPRKKATGSAHKETIYSKRLGKGSLPIRGGMAEKENMFRLDVFKKDSQYYIVPIYVVDLVKKDGFQDAPQPYKYVDGKLVLIDETYQFTFSLFKDDYVEVFTEGEVFKGYINQYSAQTGQLYLGSVDNSTCYKIKTDTFIVDDKILLPNQEYDCVATVKLFDKMKQKMIVACNGKDLELDASLKLNKKGEETKNIQTLIPYIKLAREKKISLPVMQNLKKYQVSPLGDIHEVKQETRLPLSIKKNKGKKANR

SEQ ID NO: 5732 - protein, 1012 aa, unidentified
  REGION 1..1012: note = Description of Unknown: uncultivated organism
  REGION 1..1012: note = MG40-15 effector
MRKRIFGFDLGIASIGWAVVDFDKEYFDHETGEVIEGNIVKSGVRCFPVAENPKDGSSLAEPRRLKRLARRICRRKARRMQGIKKLFIAKGLVSNETELADLYKTQRGGDVWNLRIKALSECLSAEELIRVLTHLAKHRGFKSYRKAEEEKDEASGKVLKAIQENLSLLTDNKTLAQVVVEKAGADGKKRNYTVNVKNKKDKKEAVYINSIPRVEIERELKLIFEAQKQYGIFTQDLYDDFCKIAFRYRPAGSVADMVGFCTFEKGERRAPKESPSAELFVALTKINNMSIVDENGNIRKVNQQEREKIIALLKSTKTVKYTTLASKVFAKGVTFRDINYNATQKKTKDGQLKIVNPEDVVFYEMKGWHKLKSQFTDGEWVKFENDTELLDQVVNIIACEKNDENITNKLKAMGLDEESIAKFNNCSFSKFINLSFKALYKIIPHMQEDKENLYNDACKKAGYDYRLSTDKLVDSKGLLLAAIPQDKLTTVPVVNRTVSQFRKVYNALVRQYGLPDQINIEAGRDLKKTFEERKNIKSKNEENMQERKIAAEELSENTIKDTSTNILKYRLYKEQDGKCIYSGRVIDINRLDEIGYLDVDHIIPYSRSLDNSYTNKVLCLSSENRKKGNKTPFEYIIDKNAWDEFEARVKLLHNKRKEDNLLNMTFADRELEFRERNANDNSHIARYVKQYCEDGIDFSSSPWKSIKNRVQVRTGYLTDYLRSQWGLVKNRDENDRHHAQDAIVIACATQEMVSYLSYVSSIFENKYEVQARTGEAWYKSLKDKWREPWIGFRNSVLSSLDEIFVSRPPRKNATGEIHQERIRTINPQFKKKYDAKEIKSGLAVRGGMAANGNMLRTDVFVKKNKKGKDEFYLVPVYLSDMGKELPNKAIVANKDEKEWVKIDESYIFKFSMFMDDLIKVTKGDKVIFGYFSGTHRGNGSITLEDHDRSKINAGIGVKTQDKIQKFAVDPLGKITEIKHETRLPLTNIKSNKQRIADRKVRREKTEQTKEQG

SEQ ID NO: 5733 - protein, 879 aa, unidentified
  REGION 1..879: note = Description of Unknown: uncultivated organism
  REGION 1..879: note = MG40-16 effector
MRKRIFGFDLGIASIGWAVVDFDKEYFDHETGEVIEGNIVKSGVRCFPVAENPKDGSSLAEPRRLKRLARRICRRKARRMQGIKKLFIAKGLVSNETELADLYKTQRGGDVWNLRIKALSECLSVEELIRVLTHLAKHRGFKSYRKAEEEKDEASGKVLKAIQENLSLLTENKTLAQVVVEKAGADGKKRNYTVSVKNKKNEKEAVYVNSIPRVEIERELKLIFEAQKQYGIFTQDLYDDFCKIAFRYRPAGSVADMVGFCTFEKGERRAPKESPSAELFVALTKINNMSIVDENGNIRKVNQQEREKIIALLKSTKTVKYTTLASKVFAKGVTFRDINYNATQKKTKDGKFKIVNPEDVVFYEMKGWHKLKSQFTDGEWVKFENDTELLDQVVNIIACEKNDENITNKLKAMGLDEESIAKFNNCSFSKFINLSFKALYKIIPHMKEDKENLYNDACKKAGYDYRLSTDKLVDSKGLLLAAIPQDKLTTVPVVNRTVSQFRKVYNALVRQYGLPDQINIEAGRDLKKTFEERKNIKSKNEENMQERKIAAEELSENTIKDTSTNILKYRLYKEQDGKCIYSGRVIDINRLDEIGYLDVDHIIPYSRSLDNSYTNKVLCLSSENRKKGNKTPFEYIIDKNAWDEFEARVKLLHNKRKEDNLLNMTFADRELEFRERNANDNSHIARYVKQYCEDGIDFSSSPWKSIKNRVQVRTGYLTDYLRSQWGLVKNRDENDRHHAQDAIVIACATQEMVSYLSYVSSIFENKYEVQARTGEAWYKSLKDKWREPWIGFRNSVLSSLDEIFVSRPPRKNATGEIHQERIRTINPQFKKKYDVKEIKSGLAVRGGMAANGNMLRTDVFVKKNKKGKDEFYLVPVYLS

SEQ ID NO: 5734 - protein, 1015 aa, unidentified
  REGION 1..1015: note = Description of Unknown: uncultivated organism
  REGION 1..1015: note = MG40-17 effector
MRKRIFGFDLGIASIGWAVVDFDKEYFDHETGEVIEGQIIKSGVRCFPVAENPKDGSSLAAPRREKRLARRICRRKARRMQEIKQLFIDSGLVADSDMLQKLYAEQKDGDVWNLRIKALTQKLTAAELVRVLTHLAKHRGFKSYRKAAEESDAEGGKVLKAIKANSTQLYDNKTLAQIIVERAGKNGKKRNYTETNAKGKEEAVYINSIPRIEIMRETKLIYEVQKREKGLFTDELYAKFCKIAFRYREAGSVANMVGQCIFEKDEKRAPREAPTSELFVALTKINNMSLNDNGKIRTVSPTERKQILEILKNTKLVKYSTLSSKVFAKGVKFRDIDYNKTEKRNKNNEVKTVNPEDITFYEMKGWHKLKAQFDKDEWAVVSKDTHLLDKVVNMIACEKNDAAITKALKELGVKDEWIEKFNNCTFDKFINLSFKALYNIVPYMMDSLHYNEACEKVGYDHKLTVDKLVEHKGIYLEAIASNKLTKVPVVNRTVAQFRKVYNAMARQYGLPDQINIEMGRDLKKTFDERRNLKNRQDENMKQREIIEKELNEHKIKVNAKNILKYRLYKEQSCKCIYSGKTIDLERLDEVGYLDVDHIIPYSRSFDDSYNNKVLCLSEENRKKGNKTPFDYIKNEMDWAEFEARVKLLHNKKKEDLLLCNDFQDRELAFKERNANDNSYISRYVKQYCEDGIDFSSSPWKDIKNRIQMRAGYLTDYLRWQWGLSKDRNANDRHHAQDAIVIACATQGMVSYLSYVSSVFENKFAVQAKTGEAWYQSLKKKWNEPWTGFRDSVLKSIEEIFVSRPPRKNATGEIHQERIRTINPNNKKYSEKDVKSGIFIRGGLANNGNMLRTDVFVKKNKKGKEQFYLVPVYLSDMGKELPNKAIVAGKDEKDWLIIDDSYTFKFSLYADDFVRVLKSENIDKDKIEGYFDGTDRSTGSIVLEAHDRSARYRGIGVKSLYKFQKFSVDPLGNITEIKQETRLPLTNIKSNKQRMAERKARREKLEQEKQQQTETL

SEQ ID NO: 5735 - protein, 1011 aa, unidentified
  REGION 1..1011: note = Description of Unknown: uncultivated organism
  REGION 1..1011: note = MG40-18 effector
MRKRIFGFDLGIASIGWAVVDFDKEYFDHETGEVIEGQIIKSGVRCFPVAENPKDGSSLAAPRREKRLARRICRRKARRMQEIKQLFIDSGLVADSDMLQKLYAEQKDGDVWNLRIKALTQKLTAAELVRVLTHLAKHRGFKSYRKAAEESDAEGGKVLKAIKANSTQLYDNKTLAQIIVERAGKNGKKRNYTETNAKGKEEAVYINSIPRTEIIRETKLIYEAQKKEKGLFTDELYAKFCKIAFRYREAGSVANMVGQCIFEKDEKRAPREAPTSELFVALTKINNMSLNDNGKIRTVSPTERKQILEILKNTKLVKYSTLSSKVFAKGVKFRDIDYNKTEKRNKNNEVKTVNPEDVTFYEMKGWHKLKAQFDKDEWAVVSKDTHLLDKVVNIIACEKNDASITKALKELGVKDEWIEKFNNCTFDKFINLSFKALYNIVPYMMDSLHYNEACEKVGYDHKLTVDKLVEHKGIYLEAISSNKLTKVPVVNRTVAQFRKVYNAMARQYGLPDQINIEMGRDLKRTFEERKDLKSRQDENMKQREIIEKELNEHKIKVNAKNILKYRLYKEQSCKCIYSGKTIDLERLDEVGYLDVDHIIPYSRSFDDSYNNKVLCLSEENRKKGNKTPFDYIKNEMAWAEFEARVKLLHNKKKEDLLLCKDFQDRELAFKERNANDNSYISRYVKQYCEDGIDFSSSPWKNIKNRIQMRAGYLTDYLRWQWGLSKDRNANDRHHAQDAIVIACATQGMVSYLSYVSSVFENKFAVQAKTGEAWYQSLKKKWNEPWTGFRDSVLKSIEEIFVSRPPRKNATGEIHQERIRTINPNNKKYSEKDVKSGIFIRGGLANNGNMLRTDVFVKKNKKGKEQFYLVPVYLSDMGKELPNKAIVQNKDEKDWVIIDDSYTFKFSMFMDDLIKITKGNKAILGYFCGTHRGNASITLEEHDRAKITEGIGVKGLDKFQKFSVDSLGNITEIKQETRLPLTNIKSNKQRMAERKARREKLEQEKQQQTETL

SEQ ID NO: 5736 - protein, 1005 aa, unidentified
  REGION 1..1005: note = Description of Unknown: uncultivated organism
  REGION 1..1005: note = MG40-19 effector
MRKRIFGFDLGIASIGWAVVDFDKEYFDHETGEVIEGQIIKSGVRCFPVAENPKDGSSLAAPRREKRLARRICRRKARRMQEIKQLFIDSGLVADSDMLQKLYAEQKDGDVWNLRIKALTQKLTAAELVRVLTHLAKHRGFKSYRKAAEESDTEGGKVLKAIKANSIQLSDNKTLAQIIVERAGKNGKKRNYTETNAKGKEEAVYINSIPRIEIMRETKLIYEAQKGEKGLFTDELYAKFCNIAFRYREAGSVANMVGQCIFEKDEKRAPREAPTSELFVALTKINNMSLNDNGKIRTVSPTERKQILEILKNTKLVKYSTLSSKVFAKGVKFRDIDYNKTEKRNKNNEVKTVNPEDITFYEMEGWHKLKAQFDKDEWAVVSKDTHLLDKVVNIIACEKNDASITKALKELGVKDEWIEKFNNCTFDKFINLSFKALYNIVPYMMDGLHYNEACEKVGYDHKLTVDKLVEHKGIYLEAIASDKLTKVPVVNRTVAQFRKVYNAMARQYGLPDQINIEMGRDLKKTFEERKDLKSLQDENMKQREIIEKELNEHKIKVNAKNILKYRLYKEQSCKCIYSGKTIDLERLDEVGYLDVDHIIPYSRSFDDSYNNKVLCLSEENRKKGNKTPFDYIKNEMAWAEFEARVKLLHNKKKEDLLLCKDFQDRELAFKERNANDNSYISRYVKQYCEDGIDFSSSPWKDIKNRIQMRAGYLTDYLRWQWGLSKDRNANDRHHAQDAIVIACATQGMVSYLSYVSSVFENKFAVQAKTGEAWYQSLKKKWNEPWTGFRDSVLKSIDEIFVSRPPRKNATGEIHQERIRTINPNNKKYSEKDVKSGIFIRGGLANNGNMLRTDVFVKKNKKGKEQFYLVPVYLSDMGKELPNKAIVAKKDEKDWVIIDDSYTFKFSMFMDDLIKITKGNKAILGYFCGTHRGNASITLEEHDRAKITEGIGVKGLDKFQKFSVDPLGNITEIKQETRLPLTNIKSNKQRMAERKARREKLEQEKQ

SEQ ID NO: 5737 - protein, 1008 aa, unidentified
  REGION 1..1008: note = Description of Unknown: uncultivated organism
  REGION 1..1008: note = MG40-20 effector
MRKRIFGFDLGIASIGWAVVDFDKEYFDHETGEVIEGQIIKSGVRCFPVAENPKDGSSLAAPRREKRLARRICRRKARRMQEIKQLFIDSGLVADSDMLQKLYAEQKDGDVWNLRIKALTQKLTAAELVRVLTHLAKHRGFKSYRKAAEESDTEGGKVLKAIKANSIQLSDNKTLAQIIVERAGKNGKKRNYTETNAKGKEEAVYINSIPRIEIMRETKLIYEAQKGEKGLFTDELYAKFCNIAFRYREAGSVANMVGQCIFEKDEKRAPREAPTSELFVALTKINNMSLNDNGKIRTVSPTERKQILEILKNTKLVKYSTLSSKVFAKGVKFRDIDYNKTEKRNKNNEVKTVNPEDITFYEMEGWHKLKAQFDKDEWAVVSKDTHLLDKVVNIIACEKNDASITKALKELGVKDEWIEKFNNCTFDKFINLSFKALYNIVPYMMDGLHYNEACEKVGYDHKLTVDKLVEHKGIYLEAIASDKLTKVPVVNRTVAQFRKVYNAMARQYGLPDQINIEMGRDLKKTFEERKDLKSRQDENMKQREIIEKELNEHKIKVNAKNILKYRLYKEQSCKCIYSGKTIDLERLDEVGYLDVDHIIPYSRSFDDSYNNKVLCLSEENRKKGNKTPFDYIKNEMAWAEFEARVKLLHNKKKEDLLLCKDFQDRELAFKERNANDNSYISRYVKQYCEDGIDFSSSPWKDIKNRIQMRAGYLTDYLRWQWGLTKDRNANDRHHAQDAIVIACATQGMVSYLSYVSSVFENKFAVQAKTGEAWYQSLKKKWNEPWTGFRDSVLKSIDEIFVSRPPRKNATGEIHQERIRTINPNNKKYSEKDVKSGIFIRGGLANNGNMLRTDVFVKKNKKGKEQFYLVPVYLSDMGKELPNKAIVPNKDEKDWVIIDDSYTFKFSLYADDFVRVLKSENIDKDKIEGYFDGTDRSTGAIALEAHDRSVRYRGIGVKSLYKFQKFSVDPLGNITEIKQETRLPLTNIKSNKQRMAERKARREKLEQEK

SEQ ID NO: 5738 - protein, 1009 aa, unidentified
  REGION 1..1009: note = Description of Unknown: uncultivated organism
  REGION 1..1009: note = MG40-21 effector
MRKRIFGFDLGIASIGWAVVDFDKEYFDHETGEVIEGQIIKSGVRCFPVAENPKDGSSLAAPRREKRLARRICRRKARRMQEIKQLFIDSGLVADSDMLQKLYAEQKDGDVWNLRIKALTQKLTAAELVRVLTHLAKHRGFKSYRKAAEESDTEGGKVLKAIKANSIQLSDNKTLAQIIVERAGKNGKKRNYTETNAKGKEEAVYINSIPRIEIMRETKLIYEAQKGEKGLFTDELYAKFCNIAFRYREAGSVANMVGQCIFEKDEKRAPREAPTSELFVALTKINNMSLNDNGKIRTVSPTERKQILEILKNTKLVKYSTLSSKVFAKGVKFRDIDYNKTEKRNKNNEVKTVNPEDITFYEMEGWHKLKAQFDKDEWAVVSKDTHLLDKVVNIIACEKNDASITKALKELGVKDEWIEKFNNCTFDKFINLSFKALYNIVPYMMDGLHYNEACEKVGYDHKLTVDKLVEHKGIYLEAIASDKLTKVPVVNRTVAQFRKVYNAMARQYGLPDQINIEMGRDLKKTFEERKDLKSRQDENMKQREIIEKELNEHKIKVNAKNILKYRLYKEQSCKCIYSGKTIDLERLDEVGYLDVDHIIPYSRSFDDSYNNKVLCLSEENRKKGNKTPFDYIKNEMAWAEFEARVKLLHNKKKEDLLLCKDFQDRELAFKERNANDNSYISRYVKQYCEDGIDFSSSPWKDIKNRIQMRAGYLTDYLRWQWGLTKDRNANDRHHAQDAIVIACATQGMVSYLSYVSSVFENKFAVQAKTGEAWYQSLKKKWNEPWTGFRDSVLKSIDEIFVSRPPRKNATGEIHQERIRTINPNNKKYSEKDVKSGIFIRGGLANNGNMLRTDVFVKKNKKGKEQFYLVPVYLSDMGKELPNKAIVPNKDEKDWVIIDDSYTFKFSLYADDFVRVLKSENIDKDKIEGYFDGTDRSTGAIALEAHDRSVRYRGIGVKSLYKFQKFSVDPLGNITEIKQETRLPLTNIKSNKQRMAERKARREKLEQEKQ

SEQ ID NO: 5739 - protein, 776 aa, unidentified
  REGION 1..776: note = Description of Unknown: uncultivated organism
  REGION 1..776: note = MG40-22 effector
MRKRIFGFDLGIASIGWAVVDFDKEYFDHETGEVIEGQIIKSGVRCFPVAENPKDGSSLAAPRREKRLARRICRRKARRMQEIKQLFIDSGLVADSDMLQKLYAEQKDGDVWNLRIKALTQKLTAAELVRVLTHLAKHRGFKSYRKAAEESDTEGGKVLKAIKANSIQLSDNKTLAQIIVERAGKNGKKRNYTETNAKGKEEAVYINSIPRIEIMRETKLIYEAQKGEKGLFTDELYAKFCNIAFRYREAGSVANMVGQCIFEKDEKRAPREAPTSELFVALTKINNMSLNDNGKIRTVSPTERKQILEILKNTKLVKYSTLSSKVFAKGVKFRDIDYNKTEKRNKNNEVKTVNPEDITFYEMKGWHKLKAQFDKDEWAVVSKDTHLLDKVVNIIACEKNDASITKALKELGVKDEWIEKFNNCTFDKFINLSFKALYNIVPYMMDGLHYNEACEKVGYDHKLTVDKLVEHKGIYLEAIASDKLTKVPVVNRTVAQFRKVYNAMARQYGLPDQINIEMGRDLKKTFEERKDLKSRQDENMKQREIIEKELNEHKIKVNAKNILKYRLYKEQSCKCIYSGKTIDLERLDEVGYLDVDHIIPYSRSFDDSYNNKVLCLSEENRKKGNKTPFDYIKNEMAWAEFEARVKLLHNKKKEDLLLCKDFQDRELAFKERNANDNSYISRYVKQYCEDGIDFSSSPWKDIKNRIQMRAGYLTDYLRWQWGLSKDRNANDRHHAQDAIVIACATQGMVSYLSYVSSVFENKFAVQAKTGEAWYQS

SEQ ID NO: 5740 - protein, 1011 aa, unidentified
  REGION 1..1011: note = Description of Unknown: uncultivated organism
  REGION 1..1011: note = MG40-23 effector
MRKRIFGFDLGIASIGWAVVDFDKEYFDHETGEVIEGQIIKSGVRCFPVAENPKDGSSLAAPRREKRLARRICRRKARRMQEIKQLFIDSGLVADSDMLQKLYAEQKDGDVWNLRIKALTQKLTAAELVRVLTHLAKHRGFKSYRKAAEESDTEGGKVLKAIKANSIQLSDNKTLAQIIVERAGKNGKKRNYTETNAKGKEEAVYINSIPRIEIMRETKLIYEAQKGEKGLFTDELYAKFCNIAFRYREAGSVANMVGQCIFEKDEKRAPREAPTSELFVALTKINNMSLNDNGKIRTVSPTERKQILEILKNTKLVKYSTLSSKVFAKGVKFRDIDYNKTEKRNKNNEVKTVNPEDITFYEMKGWHKLKAQFDKDEWAVVSKDTHLLDKVVNIIACEKNDASITKALKELGVKDEWIEKFNNCTFDKFINLSFKALYNIVPYMMDGLHYNEACEKVGYDHKLTVDKLVEHKGIYLEAIASDKLTKVPVVNRTVAQFRKVYNAMARQYGLPDQINIEMGRDLKKTFEERKDLKSRQDENMKQREIIEKELNEHKIKVNAKNILKYRLYKEQSCKCIYSGKTIDLERLDEVGYLDVDHIIPYSRSFDDSYNNKVLCLSEENRKKGNKTPFDYIKNEMAWAEFEARVKLLHNKKKEDLLLCKDFQDRELAFKERNANDNSYISRYVKQYCEDGIDFSSSPWKDIKNRIQMRAGYLTDYLRWQWGLSKDRNANDRHHAQDAIVIACATQGMVSYLSYVSSVFENKFAVQAKTGEAWYQSLKKKWNEPWTGFRDSVLKSIDEIFVSRPPRKNATGEIHQERIRTINPNNKKYSEKDVKSGIFIRGGLANNGNMLRTDVFVKKNKKGKEQFYLVPVYLSDMGKELPNKAIVQNKDEKDWVIIDDSYTFKFSMFMDDLIKITKGNKAILGYFCGTHRGNASITLEEHDRAKITEGIGVKGLDKFQKFSVDSLGNITEIKQETRLPLTNIKSNKQRMAERKARREKLEQEKQQQTEIL

SEQ ID NO: 5741 - protein, 909 aa, unidentified
  REGION 1..909: note = Description of Unknown: uncultivated organism
  REGION 1..909: note = MG40-24 effector
MRKRIFGFDLGIASIGWAVVDFDKEYFDHETGEVIEGQIIKSGVRCFPVAENPKDGSSLAAPRREKRLARRICRRKARRMQEIKQLFIDSGLVADSDMLQKLYAEQKDGDVWNLRIKALTQKLTAAELVRVLTHLAKHRGFKSYRKAAEESDTEGGKVLKAIKANSIQLSDNKTLAQIIVERAGKNGKKRNYTETNAKGKEEAVYINSIPRIEIMRETKLIYEAQKGEKGLFTDELYAKFCNIAFRYREAGSVANMVGQCIFEKDEKRAPREAPTSELFVALTKINNMSLNDNGKIRTVSPTERKQILEILKNTKLVKYSTLSSKVFAKGVKFRDIDYNKTEKRNKNNEVKTVNPEDITFYEMKGWHKLKAQFDKDEWAVVSKDTHLLDKVVSIIACEKNDVSITKALKELGVNDEWIAKFNKCTFDKFINLSFKALYNIVPYMMDGLHYNEACEKACYDHRLTVDKLVEHKGIYLEAIASNKLTKVPVVNRTVAQFRKVYNAMARQYGLPDQINIEMGRDLKKTFEERKDLKSRQDENMKQREIIEKELNEHKIKVNAKNILKYRLYKEQSCKCIYSGKTIDLERLDEVGYLDVDHIIPYSRSFDDSYNNKVLCLSEENRKKGNKTPFDYIKNEMAWAEFEARVKLLHNKKKEDLLLCKDFQDRELAFKERNANDNSYISRYVKQYCEDGIDFSSSPWKDIKNRIQMRAGYLTDYLRWQWGLSKDRNANDRHHAQDAIVIACATQGMVSYLSYVSSVFENKFAVQAKTGEAWYQSLKKKWNEPWTGFRDSVLKSIDEIFVSRPPRKNATGEIHQERIRTINPNNKKYSEKDVKSGIFIRGGLANNGNMLRTDVFVKKNKKGKEQFYLVPVYLSDMGKELPNKAIVAKKDEKDWVIIDDSYTFKFSMFM

SEQ ID NO: 5742 - protein, 1005 aa, unidentified
  REGION 1..1005: note = Description of Unknown: uncultivated organism
  REGION 1..1005: note = MG40-25 effector
MRKRIFGFDLGIASIGWAVVDFDKEYFDHETGEVIEGQIIKSGVRCFPVAENPKDGSSLAAPRREKRLARRICRRKARRMQEIKQLFIDSGLVADSDMLQKLYAEQKDGDVWNLRIKALTQKLTAAELVRVLTHLAKHRGFKSYRKAAEESDTEGGKVLKAIKANSIQLSDNKTLAQIIVERAGKNGKKRNYTETNAKGKEEAVYINSIPRIEIMRETKLIYEAQKGEKGLFTDELYAKFCNIAFRYREAGSVANMVGQCIFEKDEKRAPREAPTSELFVALTKINNMSLNDNGKIRTVSPTERKQILEILKNTKLVKYSTLSSKVFAKGVKFRDIDYNKTEKRNKNNEVKTVNPEDITFYEMKGWHKLKAQFDKDEWAVVSKDTHLLDKVVSIIACEKNDVSITKALKELGVNDEWIAKFNKCTFDKFINLSFKALYNIVPYMMDGLHYNEACEKACYDHRLTVDKLVEHKGIYLEAIASNKLTKVPVVNRTVAQFRKVYNAMARQYGLPDQINIEMGRDLKKTFEERKDLKSRQDENMKQREIIEKELNEHKIKVNAKNILKYRLYKEQSCKCIYSGKTIDLERLDEVGYLDVDHIIPYSRSFDDSYNNKVLCLSEENRKKGNKTPFDYIKNEMAWAEFEARVKLLHNKKKEDLLLCKDFQDRELAFKERNANDNSYISRYVKQYCEDGIDFSSSPWKDIKNRIQMRAGYLTDYLRWQWGLSKDRNANDRHHAQDAIVIACATQGMVSYLSYVSSVFENKFAVQAKTGEAWYQSLKKKWNEPWTGFRDSVLKSIDEIFVSRPPRKNATGEIHQERIRTINPNNKKYSEKDVKSGIFIRGGLANNGNMLRTDVFVKKNKKGKEQFYLVPVYLSDMGKELPNKAIVAKKDEKDWVIIDDSYTFKFSMFMDDLIKITKGNKAILGYFCGTHRGNASITLEEHDRAKITEGIGVKGLDKFQKFSVDPLGNITEIKQETRLPLTNIKSNKQRMAERKARREKLEQEKQ

SEQ ID NO: 5743 - protein, 860 aa, unidentified
  REGION 1..860: note = Description of Unknown: uncultivated organism
  REGION 1..860: note = MG40-26 effector
MRKRIFGFDLGIASIGWAVVDFDKEYFDHETGEVIEGQIIKSGVRCFPVAENPKDGSSLAAPRREKRLARRICRRKARRMQEIKQLFIDSGLVVDSDMLQKLYAEQKDGDVWNLRIKALTQKLTAAELVRVLTHLAKHRGFKSYRKAAEESDAEGGKVLKAIKANSTQLDDNKTLAQIIVERAGKNGKKRNYTETNAKGKEEAVYINSIPRTEIIRETKLIYEAQKGKKGLFTDELYAKFCKIAFRYREAGSVANMVGQCIFEKDEKRAPREAPTSELFVALTKINNMSLNDNGKIRTVSPTERKQILEILKNTKLVKYSTLSSKVFAKGVKFRDIDYNKTEKRNKNNEVKTVNPEDITFYEMKGWHKLKAQFDKDEWAVVSKDTHLLDKVVNIIACEKNDAAITKALKELGVKDEWIEKFNNCTFDKFINLSFKALYNIVPYMMDSLHYNEACEKVGYDHKLTVDKLVEHKGIYLEAIASNKLTKVPVVNRTVAQFRKVYNAMARQYGLPDQINIEMGRDLKRTFKERKDLKSLQDENRKQREIIEKELNEKHIKVNAKNILKYRLYKEQSCKCIYSGKTIDLKRLDEVGYLDVDHIIPYSRSFDDSYNNKVLCLSEENRKKGNKTPFDYIKNEMDWADFEARVKLLHNKKKEDLLLCNDFQDRELAFKERNANDNSYISRYVKQYCEDGIDFSSSPWKDIKNRIQMRAGYLTDYLRWQWGLSKDRNANDRHHAQDAIVIACATQGMVSYLSYVSSVFENKFAVQAKTGEAWYQSLKKKWNEPWTGFRDSVLKSIEEIFVSRPPRKNATGEIHQERIRTINPNNKKYSEKDVKSGIFIRGGLANNGNMLRTDVFVKKNK

SEQ ID NO: 5744 - protein, 1015 aa, unidentified
  REGION 1..1015: note = Description of Unknown: uncultivated organism
  REGION 1..1015: note = MG40-27 effector
MRKRIFGFDLGIASIGWAVVDFDKEYFDHETGEVIEGQIIKSGVRCFPVAENPKDGSSLAAPRREKRLARRICRRKARRMQEIKQLFIDSGLVVDSDMLQKLYAEQKDGDVWNLRIKALTQKLTAAELVRVLTHLAKHRGFKSYRKAAEESDAEGGKVLKAIKANSTQLDDNKTLAQIIVERAGKNGKKRNYTETNAKGKEEAVYINSIPRTEIIRETKLIYEAQKGKKGLFTDELYAKFCKIAFRYREAGSVANMVGQCIFEKDEKRAPREAPTSELFVALTKINNMSLNDNGKIRTVSPTERKQILEILKNTKLVKYSTLSSKVFAKGVKFRDIDYNKTEKRNKNNEVKTVNPEDITFYEMKGWHKLKAQFDKDEWAVVSKDTHLLDKVVNIIACEKNDAAITKALKELGVKDEWIEKFNNCTFDKFINLSFKALYNIVPYMMDSLHYNEACEKVGYDHRLTVDKLVEHKGIYLEAIASNKLTKVPVVNRTVAQFRKVYNAMARQYGLPDQINIEMGRDLKRTFKERKDLKSLQDENRKQREIIEKELNEKHIKVNAKNILKYRLYKEQSCKCIYSGKTIDLKRLDEVGYLDVDHIIPYSRSFDDSYNNKVLCLSEENRKKGNKTPFDYIKNEMDWADFEARVKLLHNKKKEDLLLCNDFQDRELAFKERNANDNSYISRYVKQYCEDGIDFSSSPWKDIKNRIQMRAGYLTDYLRWQWGLSKDRNANDRHHAQDAIVIACATQGMVSYLSYVSSVFENKFAVQAKTGEAWYQSLKKKWNEPWTGFRDSVLKSIEEIFVSRPPRKNATGEIHQERIRTINPNNKKYSEKDVKSGIFIRGGLANNGNMLRTDVFVKKNKKGKEQFYLVPVYLSDMGKELPNKAIVQNKDEKDWLIIDDSYTFKFSLYADDFVRVLKSENIDKDKIEGYFDGTDRSTGAIALEAHDRSARYRGIGVKSLYKFQKFSVDPLGNITEIKQETRLPLTNIKSNKQRMAERKARREKLEQEKQQQTETL

SEQ ID NO: 5745 - protein, 1005 aa, unidentified
  REGION 1..1005: note = Description of Unknown: uncultivated organism
  REGION 1..1005: note = MG40-28 effector
MRKRIFGFDLGIASIGWAVVDFDKEYFDHETGEVIEGQIIKSGVRCFPVAENPKDGSSLAAPRRKKRLARRICRRKARRMQEIKQLFIDSGLVADSDMLQKLYAEQKDGDVWNLRIKALTQKLTAAELVRVLTHLAKHRGFKSYRKAAEESDTEGGKVLKAIKANSTQLYDNKTLAQIIVERAGKNGKKRNYTETNAKGKEEAVYINSIPRTEIMRETKLIYEVQKREKGLFTDELYAKFCKIAFRYREAGSVANMVGQCIFEKDEKRAPREAPTSELFVALTKINNMSLNDNGKIRTVSPTERKQILEILKNTKLVKYSTLSSKVFAKGVKFRDIDYNKTEKRNKNNEVKTVNPEDVTFYEMKGWHKLKAQFNKDEWTVVSKDTHLLDKVVNIIACEKNDASITKALKELGVKDEWIEKFNNCTFDKFINLSFKALYNIVPYMMDGLHYNEACEKACYDHRLTVDKLVEHKGIYLEAIASDKLTKVPVVNRTVAQFRKVYNAMARQYGLPDQINIEMGRDLKRTFEERKDLKSRQDENMKQREIIEKELNEHKIKVNAKNILKYRLYKEQSCKCIYSGKTIDLERLDEVGYLDVDHIIPYSRSFDDSYNNKVLCLSEENRKKGNKTPFDYIKNEMAWAEFEARVKLLHNKKKEDLLLCKDFQDRELAFKERNANDNSYISRYVKQYCEDGIDFSSSPWKDIKNRIQMRAGYLTDYLRWQWGLTKDRNANDRHHAQDAIVIACATQGMVSYLSYVSSIFENKFAVQAKTGEAWYQSLKKKWNEPWTGFRDSVLKSIDEIFVSRPPRKNATGEIHQERIRTINPNNKKYSEKDVKSGIFIRGGLANNGNMLRTDVFVKKNKKGKEQFYLVPVYLSDMGKELPNKAIVPNKDEKDWVIIDDSYTFKFSMFMDDLIKITKGNKAILGYFCGTHRGNASITLEEHDRAKITEGIGVKGLDKFQKFSVDPLGNRIEIKQETRLPLTNIKSNKQRMAERKARREKLEQEKQ

SEQ ID NO: 5746 - protein, 997 aa, unidentified
  REGION 1..997: note = Description of Unknown: uncultivated organism
  REGION 1..997: note = MG40-29 effector
MSLIFGFDLGIASICWAAVKMSDPTASDTDAAAPDNRPVGEILGAGVRCFDQAQNAVDRRVARGARRRIRHRAQRMRDIRKILRQYNLIDIPEPKFNGQNNFYLNRDTDINIWQLRAVDAFTRKLTPRETGRILYHLAKHRGYDDITYPVLTGVVPEKADDAETKEELKAIGAIKDNFAKLHNENPDQTMCQMLYATEHGQMRNGRKSVIKITKDGTQRTEEQSSYSNSIPRSEIKREAEMILHAQCGFGNDFSDVFKEWCVVAFHQLKFNESKSPLAKSIEKMRGKCPFTNKPVAPKESPTAQMFVALTKCRQNGFTVAETNAIIDALYKKKTGLKYADVRKLLKWDDDSQFKTLNYSRTYDKENKKWIEPDVKKIENSKFYAFTGWHKLAKYTTDVATMDKIFDIIVTQKTPENIERAVSGILPEHAAAIAQITSSEFIKLSITALQKIIPEMAAGKKYNEAVADGLGKDFRVQNVSYIDRDDGVSAGCLHQINWNALGNRITSPVAKRTLGQLRKVYNAMVYRFGAPDRIHLEIGRELKNSPDDIARMNREQERNRQATEEARKEYGKNYFKYKLYMEQGGKCPYCGATLVAGDWAAYEIDHILPYSRSLDNSQSNKVLVCHECNQRKGNKTPYEFLTTEQFHDMAVRARALHNPAKFKKLTNTELPQSSDEQNGFIERNANDNATIARFATEYLEYGIDWPESDNIKKRVLVRTGSLTDYLRHQWGLVKNRDESDKHHAQDAIVIACATQGMVKYLSTLSARFENKYALIEKYGQAWYNVLKTSVQEPWAGFRTAVFSLLDNIIVSRPPRCNATGAAHKETIYANPKSYRSKRGLNKNRDKGSMKIRHGRVERGDMFRFDIWRDARGKYVCVPIFVADTKGKDDNNFKVPDGEFICSLHKDDYVRIYTSNQVIEGYISQMQEVIHGDKIYRYLALYTHDNHKTIVCKDDKSKAVPEIFRANVSDATNIEKFAMSLLGTPKPIKLPEQRTPVVK

SEQ ID NO: 5747 - protein, 978 aa, unidentified
  REGION 1..978: note = Description of Unknown: uncultivated organism
  REGION 1..978: note = MG40-30 effector
MSLIFGFDLGIASIGWAAVKMSDPTASDTDAAAPDNRPVGEILGAGVRCFDQAQNAADRRVARGARRRIRHRAQRMRDIRKILRQYNLIDIPEPKFNGQNNFYLNRDTDINIWQLRAVDAFTRKLTPRETGRILYHLAKHRGYDDITYPVLTGAVPEKADDAEAKEELKAIGAIKDNFAKLKRENPDQTMCQMLYATEHGQMRNGRKSVIKITKDGTQRTEEQSSYSNSIPRSEIKREAEMILHAQCGFGNDFSDVFKEWCVVAFHQLKFNESKSPLAKSIEKMRGKCPFTNKPVAPKESPTAQMFVALTKCRQNGFTVAETNAIIDALYKKKTGLKYADVRKLLKWDDDSQFKTLNYSRTYDKENKKWIEPDVKKIENSKFYAFTGWHKLAKYTTDVATMDKIFDIIVTQKTPENIERAVSGILPEHAAAIAQITSSEFIKLSITALQKIIPEMAAGKKYNEAVADGLGKDFRVQNVSYIDRDDGVSAGCLHQINWNALGNRITSPVAKRTLGQLRKVYNAMVYRFGAPDRIHLEIGRELKNSPDDIARMNREQERNRQATEEARKEYGKNYFKYKLYMEQGGKCPYCGATLVAGDWAAYEIDHILPYSRSLDNSQSNKVLVCHECNQRKGNKTPYEFLTTEQFHDMAVRARALHNPAKFKKLTNTELPQSNDDQNGFIERNANDNATIARFATEYLEYGIDWPESDNIKKRVLVRTGSLTDYLRHQWGLVKNRDESDKHHAQDAIVIACATQGMVKYLSTLSARFENKYALIEKYGQAWYNVLKTSVQEPWTGFRTAVFSLLDNIIVSRPPRCNATGAAHKETIYANPKSYRSKRGLNKNRDKGSMKIRHGRVERGDMFRFDIWRDARGKYMCIPIFVADTKGKDDNNFKVPDSEFICSLHKDDYVRLTTADGVYEGYITQMDHGTNFILYRQDNSQIQVVKKSVGKCTNIEKFAMSLLGTPKPIKLPEQRTPVVK

SEQ ID NO: 5748 - protein, 978 aa, unidentified
  REGION 1..978: note = Description of Unknown: uncultivated organism
  REGION 1..978: note = MG40-31 effector
MSLIFGFDLGIASIGWAAVKMSDPTASDTDAAAPDNRPVGEILGAGVRCFDQAQNAVDRRVARGARRRIRHRAQRMRDIRKILRQYNLIDIPEPKFNGQNNFYLNRDTDINIWQLRAVDAFTRKLTPRETGRILYHLAKHRGYDDITYPVLTGAVPEKADDAEAKEELKAIGAIKDNFAKLHNENPDQTMCQMLYATEHGQMRNGRKSVIKITKDGTQRTEEQSSYSNSIPRSEIKREAEMILHAQCGFGNDFSDVFKKWCVVAFHQLKFNESKSPLAKSIEKMRGKCPFTNKPVAPKESPTAQMFVALTKCRQNGFTVAETNAIIDALYKKKTGLKYADVRKLLKWDDDSQFKTLNYSRTYDKENKKWIEPDVKKIENSKFYAFTGWHKLAKYTTDVATMDKIFDIIVTQKTPENIERAVSGILPEHAAAIAQITSSEFIKLSISALQKIIPEMAAGKKYNEAVADGLGKDFRVQNVSYIDRDNGVSAGCLHQINWNALGNRITSPVAKRTLGQLRKVYNAMVYRFGAPDRIHLEIGRELKNSPDDIARMNREQERNRQATEEARKEYGKNYFKYKLYMEQGGKCPYCGATLVAGDWAAYEIDHILPYSRSLDNSQSNKVLVCHECNQRKGNKTPYEFLTTEQFHDMAVRARALHNPAKFKKLTNTELPQSSDEQNGFIERNANDNATIARFATEYLEYGIDWPESDNIKKRVLVRTGSLTDYLRHQWGLVKNRDESDKHHAQDAIVIACATQGMVKYLSTLSARFENKYTLIEKYGQAWYNVLKTSVQEPWAGFRTAVFSLLDNIIVSRPPRCNATGAAHKETIYANPKSYRSKRGLNKNRDKGSMKIRHGRVERGDMFRFDIWRDARGKYMCVPIFVADTKGKDDNNFKVPDSEFICSLHKDDYVRLTTADAVYEGYITQMDHGTNFILYRQDNSQIQVVKKSVGKCTNIEKFAMSLLGTPKPIKLPEQRTPVVK

SEQ ID NO: 5749 - protein, 997 aa, unidentified
  REGION 1..997: note = Description of Unknown: uncultivated organism
  REGION 1..997: note = MG40-32 effector
MSLIFGFDLGIASIGWAAVKMSDPTASDTDAAAPDNRPVGEILGAGVRCFDQAQNAVDRRVARGARRRIRHRAQRMRDIRKILRQYNLIDIPEPKFNGQNNFYLNRDTDINIWQLRAVDAFTRKLTPRETGRILYHLAKHRGYDDITYPVLTGVVPEKADDAETKEELKAIGAIKDNFAKLHNENPDQTMCQMLYATEHGQMRNGRKSVIKITKDGTQRTEEQSSYSNSIPRSEIKREAEMILHAQCGFGNDFSDVFKEWCVVAFHQLKFNESKSPLAKSIEKMRGKCPFTNKPVAPKESPTAQMFVALTKCRQNGFTVAETNAIIDALYKKKTGLKYADVRKLLKWDDDSQFKTLNYSRTYDKENKKWIEPDVKKIENSKFYAFTGWHKLAKYTTDVATMDKIFDIIVTQKTPENIERAVSGILPEHAAAIAQITSSEFIKLSITALQKIIPEMAAGKKYNEAVADGLGKDFRVQNVSYIDRDDGVSAGCLHQINWNALGNRITSPVAKRTLGQLRKVYNAMVYRFGAPDRIHLEIGRELKNSPDDIARMNREQERNRQATEEARKEYGKNYFKYKLYMEQGGKCPYCGATLVAGDWAAYEIDHILPYSRSLDNSQSNKVLVCHECNQRKGNKTPYEFLTTEQFHDMAVRARALHNPAKFKKLTNTELPQSSDEQNGFIERNANDNATIARFATEYLEYGIDWPESDNIKKRVLVRTGSLTDYLRHQWGLVKNRDESDKHHAQDAIVIACATQGMVKYLSTLSARFENKYALIEKYGQAWYNVLKTSVQEPWAGFRTAVFSLLDNIIVSRPPRCNATGAAHKETIYANPKSYRSKRGLNKNRDKGSMKIRHGRVERGDMFRFDIWRDARGKYVCVPIFVADTKGKDDNNFKVPDGEFICSLHKDDYVRIYTSNQVIEGYISQMQEVIHGDKIYRYLALYTHDNHKTIVCKDDKSKAVPEIFRANVSDATNIEKFAMSLLGTPKPIKLPEQRTPVVK

SEQ ID NO: 5750 - protein, 955 aa, unidentified
  REGION 1..955: note = Description of Unknown: uncultivated organism
  REGION 1..955: note = MG40-33 effector
MSLIFGFDLGIPSIGWAAVKISDPTASATDAAAPDKRPAGEILGAGVRCFDQAQNAADRRMVRGARRRIRHRAQRMREIRAILRKYNLIDIPEPKSNGKNNFYLNRDTDINIWQLRAVDAFTRKLTPRETGRILYHLAKHRGYDDITYPVSADTKSEKADNADAKEELKAIGEIKRNLAKLHNENPNQTMCQMLYAINHSQHIKMRNGRKSGTKIAKDGTQKTELQSPYSNSIPRSQIKREAEMILRAQRDFGNDFSNVFTKWFDVAFRQRKFNESASPLAKSIEEMRGKCPFTNEPVAPKESPTAQMFVALTKCRQNDFTVEETKKIIDELYKKKTGLKYADVRELLKWDDDRRFKTLNYSRTYDKENKILIEPDIKKIEDRKFYAFTGWHKLAKYTTDIATMDKIFDIIATQKTPENIERAVSEILPEHAAAIAQITSSEFIKLSISALQKIIPEMEKGKKYNEAVAAGLNQDFRAQNVSYINRDDGASAGYLHQINWCLLGNRITSPVAKRTLGQLRKVYNAMVYRFGSPDRIHLEIGRELKNSPDDIARMKREQERNRQATADARKEYGKNYFKYKLYMEQGGKCPYCNATLVAGDWAAYEIDHILPYSRSLDNSQSNKVLVCHECNQRKGSKTPYEFLTSEQFFDMTVRARALHNPAKFKKQTNTDLPQSNDDQNGFIERNANDNATIAKFAAEYLEYGIDWSASDDIKKRVLVRTGSLTDYLRHQWGLVKNRDESDRHHAQDAIVIACATQGMVKYLSTLSARFENKYALIQKNGQAWYNALKTSIQEPWDGFRTDVISCLGNVIVSRPPRCNATGAAHDETIYADPKSYRSKRGMNKNRDKGSLEIRHGRAVRGNMFRFDIWRNARGKYVCVPIFVTDTKGKDDDAFKIPDGEFVCSLHKDDYVRLTTADGMYEGYITQMDHGRNFILYRQDNSKNIVVTKAVGKCTN

SEQ ID NO: 5751 - protein, 1065 aa, unidentified
  REGION 1..1065: note = Description of Unknown: uncultivated organism
  REGION 1..1065: note = MG47-1 effector
MKLKLGLDIGIASVGWGIIDENYDVKDSGVRLFSEGTAKANETRRVMRGQRRRLRRQKHRLYRMGKLLSDVLNIDYPEIVGNIYEIRCRGIKEPISTEELYLAIMYLTKFRGTHFLTAEDFQINDSGENLSKVLANLDDKEYVCNIQYKYFLEHGEIRGTECNHFRNKDYKRELDKLLQVQAKYHKELSENICKEIETIYSSKREYYEGPGSEKSPTPYGCWRYDEHGEKIQVNIIDEMRGYCTYFAKEKRIAKQSYTACLFNLLNDLNNLLIDGRKITYEEKKKLITEYIDNGKPLTEKIIKKVLAVKNDISGYRVDSKGKAIFTKFEGYNSIIKVYKDLNIDNTLIKGNRELMDKIAEILTKEKNIEKAKAELINIGLEAVADELVKLPKFTQYHSLSKKAMELILDDLWHESKNQMQLFNEAGMKPEKNSIAKGKNIKIDMSEWIVSPVTLRAVNETIKVINAARDFVRKKYNQELAEIIVEMPRDKNSDEQKKRILKAQKLNESQHKAIQAMVDGRNINGKIFLLLKLLQEQDFKCAYSGKSITVADVLNGIVSLEVDHIIPISVSFDDSLANKVAVLREENQNKGQRTPYQYFNSGRAKISWQEYRDNVLNNKTYSNKKKANLLYEGDLNKDLLGFVGRNLSDTRYASRKVLNTLQEYFKMNEIPTKVKVVNGAFTHQFRKQAKLSKNREETFAHHAQDALIIAGLSNVSIMKVLDDILTKDIKAMDDKTNILVKNGKVINQATGEILSEGDFSDKTGNYIRFIKHVENRKQKYSHKVDRKPNRQLYAQQVKGTRVRENNKGNMENWIVTKYKDIYSTAHNNSGTKLADLIRKKKEPEKLLMYQHDYKTYEVFKKIVENYPDEKNPFAAYKADYGYIRKYAKKGNGPIINDVKFLEKKLGNHRVNTKIAGSNKSVYLSIKTLRADVYLQAGKYSIIDVPYDMLDCTANGYVINKGKYALAKQKKKLNNTAEFCFSLYNGERFDYKDKAGICYTWIYSCIADGKNNKIEVKFIDKPSPASTQGKRLKTIGVNVCNMVKYNVDILGNEHPIKKEKFVDHFTK

SEQ ID NO: 5752 - protein, 1064 aa, unidentified
  REGION 1..1064: note = Description of Unknown: uncultivated organism
  REGION 1..1064: note = MG47-2 effector
MNFKLGLDLGVASVGWGIIDENYNIIDSGVRLFSEASAKENVKRREMRSSRRRVRRVRHRLDRMGILLSEILEIDLPEPFGNIYEIRCRGLKEKLKKEELFLALMHLTKRRGTFYLTADDIENKEDNGKSTEEILLEQEIKLKENYICEIQYKEFLEKGRVRGTENRFKNKEYLHELEALLNMQAQFYPVIAEYKDEIYKIYNSKREYFEGPGSEKSPTPYGSYRYDENGNVIKVNLIDLMRGKCTYFPDEKRIAKGAYTAALFNILNDLNNLKIKDRKITEEEKRNLIENYINKGKNITLNYIAKVTGVDVEEISGYRIDKSEKPIFTEFKQYKDILKVFDKFGDRKLVEGNALLCDDIAEVLTKEKSVDIRKSELEKRGIGKNIASEIAKLSGFTQYHSLSKKAINTIIGDLWSTGKNQMQLFHDCGLTEYKNRANLGEKIKFDGSEWIVSPITKRTVTEAVKVINACRKMLKQKYNTEFSDVVIEMAREKNLDEKKKMEKDIQKKNELRAKAIHELTSNRKLTPRQFEIINLLLDQDMRSAYSGKAVSLPQVYEGMLEVDHIIPRSISFDDSKNNKVAVFISENQKKAQRTPFMYLKSGEGEISYEKFKEMVLKNTRYSKSKKANLLLENGLPEKEMIGFINRNLVDTRYACRKVLNMLQDYFKINNIDTKVKVIKGSATFAFRKKAKLDKNREESYAHHAQDALIIAGLFNTDLMKKLNCIVDLNEEFINDKENLIFENGKVINKNTGEFISDEDFNASKYIQFIKQVELRKQKYSHKVDRKPNRQLYDQQLKSTRAIIDEKGKEKTYVITKYKNIYAVGVGSTGDKLAERIRKNPESLLMYHNDPETFKKLLEVVNAYPDKKINPFAKYKEEYNQYITKYAKHNNGPIIMDVKFIDGQLGVHRVNKKQNGKNKSVYLQIKSLRADFYYVDGAYKFINVPYDMIYKENGIYKLDMEKYQAAKVQKGINGDAEFKFSLHRGEFFSYKKDKEEFWWQFSCVNSDTKNVIETKYIDKPSPGNTQKYRMITIGKKITDMCKYNVDVLGNIYPVDKEILKVEIAM

SEQ ID NO: 5753 - protein, 1034 aa, unidentified
  REGION 1..1034: note = Description of Unknown: uncultivated organism
  REGION 1..1034: note = MG47-3 effector
ASVGWGIIDENYEIIDSGVRLFSERSADDNVVRRTSRSTRRRIRRLQHRLERMRNFLLEIFRIKKLNSEEYNIYEVRCRGLEQKLSKDEIIRAILHLTKRRGTHFLTAEDFIELNNEKSTESILQEQEEKLANAYVCQIQLENFNRNKVRGIENRFRNKEYLKELTKLLETQGQYYKEILNNKDEIIKIYSSKREYFEGPGSEKSPTPYGRWRYDEQGKLIEVNLIELMRGVCTFFPEEKRIAKNSYTACLFNLLNDLNNLTVEGREISFDEKNILISQYVNKGKNVSLNNIASVCNCNKEDIRGYRVNKDDKAIFTEFSGYIEILKAVKKSGEDNCDIVGNRKLVDEIAEILTKEKNVEERFDKLILLKLKDTVAEELSKLNKFTQYHALSKKAMELILDDLLESNLNQMQLFFQNGLAEKKNQDLKGSTIKFDGSDWIVSPVTKRAISETVKVINAVRKKIRKEFNADFSEIVIEMAREKNTKDKLVFIKKVQKEQEKINKEIKDHTGENKVSSKIAQTIKLWLEQDCKCAYSQQAISINDIMDGNVEIDHIIPLSLSFDDSQSNKVAVYIYENQKKGQRTPLQYLKSGSGKISYDQYKAWVIKTYAKNKKKRENLLYEGDPRIDLTGFINRNLNDTRYASKEVLNLLQSYFKANNLNTKISVIKGSFTHYFRKKAKLNKNRELTYAHHAQDALIVAGLSNIDLMKKVQNIATVIEDKDNIIVKDNKIVNIATGEIISKEDFSAGKYIQFIKGVELVKPKYSFKVDKKPNRQLYDANIKATRTIDDKTSVITKYKNIYDVSGEKLKEKILQNPEDLLMYHYDEKTFKIFQEIVNHYVDSKNPFNQYFLETGMKVRKYAKDGNGPEINDVKFCDGELGNHRKNIKQVSENKSVYLQIKTLRADFYLDEGIYKFVTVPYDMIKPVGTEFEIEKDKYEDAKNLKKISKKAEYLFSLHRGERFSYINKGEYFEYNYTCVNNDKTNRLDVKYFDKPNDKQIMKTIGKNISELKKYNIDVLGNKYEVQREELRFNVSL

SEQ ID NO: 5754 - protein, 1057 aa, unidentified
  REGION 1..1057: note = Description of Unknown: uncultivated organism
  REGION 1..1057: note = MG47-4 effector
KINIKLNLEANKVKLKLGLDIGVASVGWGIIDENYEIIDSGVRLFSERSADDNVVRRTSRSTRRRIRRLQHRLERMRNFLLEMFGIEKLNSEEYNIYEVRCRGLEQKLSKDEIIRAILHLTKRRGTHFLTAEDFIELNNEKSTESILQEQEEKLANAYVCQIQLENFNKNKVRGIENRFRNKEYLKELTKLLETQGQYYKEILNNKDEIIKIYSSKREYFEGPGSEKSPTPYGRWRYDEQGNLIEVNLIELMRGACTFFPEEKRIAKNSYTACLFNLLNDLNNLTVEGREISFDEKNILISQYVNKGKNVSLNNIASVCNCNKEDIRGYRVNKDDKAIFTEFSGYIEILKAVKKSGEDNCDIVGNRKLVDDIAEILTKEKNVEERFDKLILLKLKDTVAEELSKLNKFTQYHSLSKKAMELILDDLLESNLNQMQLFFQNGLAEKKNQDLKGSTIKFDGSDWIVSPVTKRAVSETVKVINAVRKKVRKEFNADFSEIVIEMAREKNTKDKLVFIKKVQKEQEKINKEIKDHTGENKVSSKIAQTIKLWLEQDCKCAYSQQAISINDIMDGNVEIDHIIPLSLSFDDSQSNKVAVYIYENQKKGQRTPLQYLKSGSGKISYDQYKAWVIKTYAKNKKKRENLLYEGDPRIDLTGFINRNLNDTRYASKEVLNLLQSYFKANNLNTKISVIKGSFTHYFRKKAKLNKNRELTYAHHAQDALIVAGLSNIDLMKKVQNIAKAIGDKENIIVKDNKIVNIATGEIISKEDFSAGKYIQFIKGVELVKPKYSFKVDKKPNRQLYDANIKATRTIDDKTSVITKYKNIYDGSGEKLKEKILQKPEDLLMYHYDEKTFKIFQEIVKQYADSKNPFNQYFLETGMKVRKYAKDGNGPEINDVKFCDGELGNHRKNIKQVSENKSVYLQIKTLRADFYLDEGIYKFVTVPYDMIKPVGTEFEIEKDKYEAAKNLKKISKKAEYLFSLHRGERFSYIDKGEYFEYNYTCVNNDKTNRLDVKYFDKPNDKQIKKTIGKNISELKKYNIDVLGNKYEVQREELRFNVSL

SEQ ID NO: 5755 - protein, 969 aa, unidentified
  REGION 1..969: note = Description of Unknown: uncultivated organism
  REGION 1..969: note = MG47-5 effector
LNSEEYNIYEVRCRGLEQKLSKAEIIRPILHLTKRRGTHFLTAEDFIELNNEKSTESILQEQEEKLANAYVCQIQLENFNKNKVRGIENRFRNKEYLKELTKLLETQGQYYKEILNNKDEIIKIYSSKREYFEGPGSEKSPTPYGRWRYDEQGKLIEVNLIELMRGACTFFPEEKRIAKNSYTACLFNLLNDLNNLMVEGREISFDEKNILISQYVNKGKNVSLNNIASVCNCNKEDIRGYRVNKDDKAIFTEFSGYIEILKAVKKSGEDNCDIVGNRKLVDDIAEILTKEKNVEERFDKLILLKLKDTVAEELSKLNKFTQYHSLSKKAMELILDDLLESNLNQMQLFFQNGLAEKKNQGLKGSTIKFDGSDWIVSPVTKRAVSETVKVINAVRKKIRKEFNADFSEIVIEMAREKNTKDKLVFIKKVQKEQEKINKEIKDHTGENKVSSKIAQTIKLWLEQDCKCAYSQQAISINDIMDGNVEIDHIIPLSLSFDDSQSNKVAVYIYENQKKGQRTPLQYLKSGSGKISYDQYKAWVIKTYAKNKKKRENLLYEGDPRIDLTGFINRNLNDTRYASKEVLNLLQSYFKVNNLNTKISVIKGSFTHYFRKKAKLNKNRELTYAHHAQDALIVAGLSNIDLMKKVQNIAKAIDDKENIIVKDNKIVNIATGEIISKEDFSAGKYIQFIKGVELIKPKYSFKVDKKPNRQLYDANIKATRTIDDKTSVITKYKNIYDVSGEKLKEKILQKPEDLLMYHYDEKTFKIFQEIVNHYVDSKNPFNQYFLETGMKVRKYAKDGNGPEINDVKFCDGELGNHRKNIKQVSENKSVYLQIKTLRADFYLDEGIYKFVTVPYDMIKPVGTEFEIEKDKYEDAKNLKKISKKAEYLFSLHRGERFSYINKGEYFEYNYTCVNNDKKNVIDVKCFDKPNDKRIMKTIGKNISELKKYNIDVLGNKYEVQREELRFNVSL

SEQ ID NO: 5756 - protein, 1073 aa, unidentified
  REGION 1..1073: note = Description of Unknown: uncultivated organism
  REGION 1..1073: note = MG47-6 effector
MIGMKLILGLDIGIASVGYGIINENFEIITTGARLFSEGAAANNLERRTFRGTRRRIRRVKHRLTRMKELLFDVFGEHEAESFDNIYEIRCKGLRERLEPQEIMAAILHLTKRRGIHYLTAEDVDLDSASKGEVAQTLTENSEKLGSRYICELQLEELKKTGVVRGVENKFVHQKYEQELDALLEKQSEYYEELGKAIEAIKKIYNSKREFFEGPGSKISPTPYGRFRYNAEGNVEEVNLLDLMRGKCTYFPDEKRMAKWSYTTCLFNLLNDLNNLTVRGNTTGDDKLSYEQKKELIDNKINQGRNITLNDIAKVCGVEPDAISGYREDKSGKAIFTTFDGYKKVLTKAKTLGVQDLIIGNRELVDTIADILTQEKDIVKREEALVEAGIAKEFAVEISKIDAFKEYHSLSKKAIELILSDLWHTNKNQMQLFTEAGLSDEKLVAVKGKELAVDLDNWIVSPVTKRSVNETVKVINALRAWIKKQYGKDTEFSDIVIEMAREKNSEDKKQWIKKIQKEQETRKRDALLMAGDRKPNGTEMLMLSLLAEQDWKCAYSLQPISVDEVFKSKALEIDHIIPRSISFSDARSNKVVVKSVENQKKKNRTPYYYFSSGDNKNGISYEEFKQHVLANKKFSRAKKANLLYEENPLEHVQDFINRNLVDTRYASRKVLNLLQQFVKANELPTSVKVINGLVTHRFRAKAMLDKDRDATYAHHAQDALIIAGMGNTNILKTLTKWNAFSDGFADEKFIVDEFGQLIDKETGEIITNEDMDAPKYIRFIKSVEKVTPKFSFKVDRKPNRQLYDQQIKSTRVVTNDKGKDEAYIVTKYSDIYNSGANSSGEKLKKKILEHPETLLMYKHDPKTFEIFKKIVDEYKDEKNPFAAYKEDHGKIRKYSKKGIGPEIDSVKFLDGKLGSHRVNTKQTGNHQSVFLQLKSLRVDVYLDDGVYKLVNVLYDMVKNTATKYIVDEIKYEAAKTKKKISAKAEFLFSLYRGEMISYKKDGELETWIFSCMNNDKTNCVEFKFPDKPSPGNTQPKRMHTIGKKITDFTKYHVDVLGNAYPITREKLQMEIEK

SEQ ID NO: 5757 - protein, 1067 aa, unidentified
  REGION 1..1067: note = Description of Unknown: uncultivated organism
  REGION 1..1067: note = MG47-7 effector
MKLKLGLDIGIASVGWGIIDENYDVKDSGVRLFSEGTAKANETRRVMRGQRRRLRRQKHRLYRMGKLLSDVLNIDYPEIVGNIYEIRCRGIKEPISTEELYLAIMYLTKFRGTHFLTAEDFQINDSGENLSKVLANLDDKEYVCNIQYKYFLEHGEIRGTECNHFRNKDYKRELDKLLQVQAKYHKELSENICKEIETIYSSKREYYEGPGSEKSPTPYGRWRYDEHGEKIQVNIIDEMRGYCTYFAKEKRIAKQSYTACLFNLLNDLNNLLIDGRKITYEEKKKLITEYIDNGKPLTEKIIKKVLAVKNDISGYRVDSKGKAIFTKFEGYNSIIKVYKDLNIDNTLIKGNRELMDKIAEILTKEKNIEKAKAELINIDIGLEAVADELVKLPKFTQYHSLSKKAMELILDDLWHESKNQMQLFNEAGMKPEKNSIAKGKNIKIDMSEWIVSPVTLRAVNETIKVINAARDFVRKKYNQEFAEIIVEMPRDKNSDEQKKRILKAQKLNESQHKAIQAMVDGRNINGKIFLLLKLLQEQDFKCAYSGKSITVADVLNGIVSLEVDHIIPISVSFDDSLANKVAVLREENQNKGQRTPYQYFNSGRAKISWQEYRDNVLNNKTYSNKKKANLLYEGDLNKDLLGFVGRNLSDTRYASRKVLNTLQEYFKMNEIPTKVKVVNGAFTHQFRKKAKLSKNREETFAHHAQDALIIAGLSNVSIMKVLDDILTKDIKAMDDKTNLLVKNGKVINQATGEILSEGDFSDKTGNYIRFIKHVENRKQKYSHKVDRKPNRQLYAQQVKGTRVRENNKGNMETWIVTKYKDIYSTAHNNSGTKLADLIRKKKEPEKLLMYQHDYKTYEVFKKIVENYPDEKNPFAAYKADYGYIRKYAKKGNGPIINDVKFLEKKLGNHRVNTKIAGSNKSVYLSIKTLRADVYLQSGKYSIIDVPYDMLDCTANGYVINKGKYALAKQKKKLNNTAEFCFSLYNGERFDYKDKAGICYTWIYSCIADGKNNKIEVKFIDKPSPASTQGKRLKTIGVNVCNMVKYNVDILGNEHPIKKEKFVDHFTK

SEQ ID NO: 5758 - protein, 801 aa, unidentified
  REGION 1..801: note = Description of Unknown: uncultivated organism
  REGION 1..801: note = MG47-8 effector
MKLKLGLDIGVASVGWGIIDENYEIIDSGVRLFSERSADDNVVRRTSRSTRRRIRRLQHRLERMRKFLLEIFRIEKLNSKEYNIYEVRCRGLEQKLSKDEIIRAILHLTKRRGTHFLTAEDFIELNNEKSTESILQEQEEKLANAYVCQIQLENFNKNKVRGIENRFRNKEYLKELTKLLETQGQYYKEILNNKDEIIKIYSSKREYFEGPGSEKSPTPYGRWRYDEQGKLIEVNLIELMRGVCTFFPEEKRIAKNSYTACLFNLLNDLNNLMVEGREISFDEKNILISQYVNKGKNVSLNNIASVCNCNKEDIRGYRVNKDDKAIFTEFSGYIEILKAVKKSGEDNCDIVGNRNVVDDIAEILTKEKNVEERFDKLIFLKLKETVAEELSKLNTFTQYHSLSKKAMELILDDLLESNLNQMQLFFQNGLAEKKNQGLKGSTIKFDGSDWIVSPVTKRAVSETVKVINAVRKKIRKEFNADFSEIVIEMAREKNTKDKLAFIKKVQKEQEKINKEIKDHTGENKVSSKIAQTIKLWLEQDCKCAYSQQAISINDIMDGNVEIDHIIPLSLSFDDSQSNKVAVYIYENQKKGQRTPLQYLKSGSGKISYDQYKAWVIKTYAKNKKKRENLLYEGDPRIDLTGFINRNLNDTRYASKEVLNLLQSYFKANNLNTKISVIKGSFTHYFRKKAKLNKNRELTYAHHAQDALIVAGLSNIDLMKKVQNIATVIEDKENIIVKDNKIVNIATGEIISKEDFSAGKYIQFIKGVELIKPKYSFKVDKKPNRQLYDANIKATRTIDDKT

SEQ ID NO: 5759 - protein, 1057 aa, unidentified
  REGION 1..1057: note = Description of Unknown: uncultivated organism
  REGION 1..1057: note = MG47-9 effector
MKLKLGLDIGVASVGWGIIDENYEIIDSGVRLFSERSADDNVVRRTSRSTRRRIRRLQHRLERMRKFLLEIFRIEKLNSKEYNIYEVRCRGLEQKLSKDEIIRAILHLTKRRGTHFLTAEDFIELNNEKSTESILQEQEEKLANAYVCQIQLENFNKNKVRGIENRFRNKEYLKELTKLLETQGQYYKEILNNKDEIIKIYSSKREYFEGPGSEKSPTPYGRWRYDEQGKLIEVNLIELMRGVCTFFPEEKRIAKNSYTACLFNLLNDLNNLTVEGREISFDEKNILISQYVNKGKNVSLNNIASVCNCNKEDIRGYRVNKDDKAIFTEFSGYIEILKAVKKSGEDNCDIVGNRNLVDDIAEILTKEKNVEERFDKLILLKIKDTVAEELSKLNKFTQYHSLSKKAMELILDDLLESNLNQMQLFFQNGLAEKKNQGLKGSTIKFDGSDWIVSPVTKRAVSETVKVINAVRKKIRKEFNADFSEIVIEMAREKNTKDKLAFIKKVQKEQEKINKEIKDHTGENKVSSKIAQTIKLWLEQDCKCAYSQQAISINDIMDGNVEIDHIIPLSLSFDDSQSNKVAVYIYENQKKGQRTPLQYLKSGSGKISYDQYKAWVIKTYAKNKKKRENLLYEGDPRIDLTGFINRNLNDTRYASKEVLNLLQSYFKANNLNTKISVIKGSFTHYFRKKAKLNKNRELTYAHHAQDALIVAGLSNIDLMKKVQNIATVIEDKENIIVKDNKIVNIATGEIISKEDFSAGKYIQFIKGVELVKPKYSFKVDKKPNRQLYDANIKATRTIDDKTSVITKYKNIYDVSGEKLKKKILQNPEYLLMYHYDEKTFKIFQEIVDHYVDSKNPFNQYFLETGMKVRKYAKDGNGPVINDVKFCDGELGNHRKNIKQVSKNKSIYLKIKTLRADFYLDEGIYKFVTVPYDMIKPVGTEFEIEKDKYEDAKNLKKISKKAEYLFSLHRGERFSYINKGEYFEYNYTCVKDDKRNKIEAKYYDKPQIDSKDKEKPDSKNEPPTTSVGKNISEFKKYNIDVLGNKYEVQREELRFNVSL

SEQ ID NO: 5760 - protein, 1045 aa, unidentified
  REGION 1..1045: note = Description of Unknown: uncultivated organism
  REGION 1..1045: note = MG47-10 effector
MKLKLGLDIGVASVGWGIIDENYEIIDSGVRLFSERSADDNVVRRTSRSTRRRIRRLQHRLERMRKFLLEIFRIEKLNSKEYNIYEVRCRGLEQKLSKDEIIRAILHLTKRRGTHFLTAEDFIELNNEKSTESILQEQEEKLANAYVCQIQLENFNRNKVRGIENRFRNKEYLKELTKLLETQGQYYKEILNNKDEIIKIYSSKREYFEGPGSEKSPTPYGRWRYDEQGKLIEVNLIELMRGVCTFFPEEKRIAKNSYTACLFNLLNDLNNLTVEGREISFDEKNILISQYVNKGKNVSLNNIASVCNCNKEDIRGYRVNKDDKAIFTEFSGYIEILKAVKKSGEDNCDIVGNRKLVDEIAEILTKEKNVEERFDKLILLKLKDTVAEELSKLNKFTQYHSLSKKAMELILDDLLESNLNQMQLFFQNGLAEKKNQDLKGSTIKFDGSDWIVSPVTKRAVSETVKVINAVRKKIRKEFNADFSEIVIEMAREKNTKDKLVFIKKVQKEQEKINKEIKDHTGENKVSSKIAQTIKLWLEQDCKCAYSQQAISINDIMDGNVEIDHIIPLSLSFDDSQSNKVAVYIYENQKKGQRTPLQYLKSGSGKISYDQYKAWVIKTYAKNKKKRENLLYEGDPRIDLTGFINRNLNDTRYASKEVLNLLQSYFKANNLNTKISVIKGSFTHYFRKKAKLNKNRELTYAHHAQDALIVAGLSNIDLMKKVQNIATVIEDKENIIVKDNKIVNIATGEIISKEDFSAGKYIQFIKGVELVKPKYSFKVDKKPNRQLYDANIKATRTIDDKTSVITKYKNIYDVSGEKLKEKILQKPEDLLMYHYDEKTFKIFQEIVKQYADSKNPFNQYFLETGMKVRKYAKDGNGPEINDVKFCDGELGNHRKNIKQVSENKSVYLQIKTLRADFYLDEGIYKFVTVPYDMIKPVGTEFEIEKDKYEAAKNLKKISKKAEYLFSLHRGERFSYIDKGEYFEYNYTCVNNDKTNRLDVKYFDKPNDKQIKKTIGKNISELKKYNIDVLGNKYEVQREELRFNVSL

SEQ ID NO: 5761 - protein, 869 aa, unidentified
  REGION 1..869: note = Description of Unknown: uncultivated organism
  REGION 1..869: note = MG47-11 effector
MKLKLGLDIGVASVGWGIIDENYEIIDSGVRLFSERSADDNVVRRTSRSTRRRIRRLQHRLERMRKFLLEIFRSEKLNSEEYNIYEVRCRGLEQKLSKDEIIRAILHLTKRRGTHFLTAEDFIELNNEKSNESILQEQEEKLANAYVCQIQLENFNRNKVRGIENRFRNKEYLKELTKLLETQGQYYKEILNNKDEIIKIYSSKREYFEGPGSEKSPTPYGRWRYDEQGNLIEVNLIELMRGACTFFPEEKRIAKNSYTACLFNLLNDLNNLTVEGREISFDEKNILISQYVNKGKNVSLNNIASVCNCNKEDIRGYRVNKDDKAIFTEFSGYIEILKAVKKSGEDNCDIVGNRKLVDEIAEILTKEKNVEERFDKLILLKLKDTVAEELSKLNKFTQYHSLSKKAMELILDDLLESNLNQMQLFFQNGLAEKKNQDLKGSTIKFDGSDWIVSPVTKRAVSETVKVINAVRKKVRKEFNADFSEIVIEMAREKNTKDKLVFIKKVQKEQEKINKEIKDHTGENKVSSKIAQTIKLWLEQDCKCAYSQQAISINDIMDGNVEIDHIIPLSLSFDDSQSNKVAVYIYENQKKGQRTPLQYLKSGSGKISYDQYKAWVIKTYAKNKKKRENLLYEGDPRIDLTGFINRNLNDTRYASKEVLNLLQSYFKANNLNTKISVIKGSFTHYFRKKAKLNKNRELTYAHHAQDALIVAGLSNIDLMKKVQNIATVIEDKENIIVKDNKIVNIATGEIISKEDFSAGKYIQFIKGVELVKPKYSFKVDKKPNRQLYDANIKATRTIDDKTSVIRKYKNIYDVSGEKLKKKILQKPEYLLMYHYDEKTFKIFQEIVNHYVDSKNPFNQYFLETGMKERK

SEQ ID NO: 5762 - protein, 847 aa, unidentified
  REGION 1..847: note = Description of Unknown: uncultivated organism
  REGION 1..847: note = MG47-12 effector
MKLKLGLDIGVASVGWGIIDENYEIIDSGVRLFSERSADDNVVRRTSRSTRRRIRRLQHRLERMRNFLLEIFGIEKLNSEEYNIYEVRCRGLEQKLSKDEIIRAILHLTKRRGTHFLTAEDFIELNNEKSTESILQEQEEKLANAYVCQIQLENFNKNKVRGIENRFRNKEYLKELTKLLETQGQYYKEILNNKDEIIKIYSSKREYFEGPGSEKSPTPYGRWRYDEQGKLIEVNLIELMRGVCTFFPEEKRIAKNSYTACLFNLLNDLNNLTVEGREISFDEKNILISQYVNKGKNVSLNNIASVCNCNKEDIRGYRVNKDDKAIFTEFSGYIEILKAVKKSGEDNCDIVGNRNLVDEIAEILTKEKNVEERFDKLILLKIKDTVAEELSKLNKFTQYHSLSKKAMELILDDLLESNLNQMQLFFQNGLAEKKNQGLKGSTIKFDGSDWIVSPVTKRAVSETVKVINAVRKKIRKEFNADFSEIVIEMAREKNTKDKLAFIKKVQKEQEKINKEIKDHTGENKVSSKIAQTIKLWLEQDCKCAYSQQAISINDIMDGNVEIDHIIPLSLSFDDSQSNKVAVYIYENQKKGQRTPLQYLKSGSGKISYDQYKAWVIKTYAKNKKKRENLLYEGDPRIDLTGFINRNLNDTRYASKEVLNLLQSYFKVNNLNTKISVIKGSFTHYFRKKAKLNKNRELTYAHHAQDALIVAGLSNIDLMKKVQNIATVIEDKENIIVKDNKIVNIATGEIISKEDFSAGKYIQFIKGVELIKPKYSFKVDKKPNRQLYDANIKATRTIDDKTSVIRKYKNIYDVSGEKLKEKILQKPEDLLMYHYDEKTFKIFQEIVK

SEQ ID NO: 5763 - protein, 1064 aa, unidentified
  REGION 1..1064: note = Description of Unknown: uncultivated organism
  REGION 1..1064: note = MG47-13 effector
MNFKLGLDLGVASVGWGIIDENYNIIDSGVRLFSEASAKENVKRREMRSSRRRVRRVRHRLDRMGILLSEILEIDLPEPFGNIYEIRCRGLKEKLKKEELFLALMHLTKRRGTFYLTADDIENKEDNGKSAEEILLEQEIKLKGNYICEIQYKEFLENGKVRGTENRFKNKEYLREVEALLNMQAQFYPVIAEYKDEIYKIYNSKREYFEGPGSEKSPTPYGSYRYDENGNVIKVNLIDLMRGKCTYFPDEKRIAKGAYTAALFNILNDLNNLKIKDRKITEEEKRNLIENYINKGKNITLNYIAKVTGVDVEEISGYRIDKSEKPIFTEFKQYKDILKVFDKFGDRKLVEGNALLCDDIAEVLTKEKSVDIRQSELEKRGVEKNIAAEIAKLSGFTQYHSLSKKAINMIINDLWASDKNQMQLFHDCGLTEYKNSANLGEKIKFDGSEWIVSPITKRTVNEAVKVINACRKMLKQKYNTEFSDIVIEMAREKNLDEKKKMEKDIQKKNELRAKAIHELTSNRKLTPRQFEIINLLLDQDMRSAYSGKAVSLPQVYEGMLEVDHIIPRSISFDDSKNNKVAVFISENQKKAQRTPFMYLKSGEGEISYEKFKEMVLKNTKYSKSKKANLLLENGLPEKEMIGFINRNLVDTRYACRKVLNMLQDYFKINNIDTKVKVIKGSATFAFRKKAKLDKNREESYAHHAQDALIIAGLFNTDLMKKLNCIVDLNEEFINDKENLIFENGKVINKNTGEFISDEDFNASKYIQFIKQVELRKQKYSHKVDRKPNRQLYDQQLKSTRTIIDEKGKEKTYVITKYKNIYVEGIGSTGDKLAERIRKNPESLLMYHNDPATFKKLLEVVNAYPDKKINPFAKYKEEYNQYITKYAKHNNGPIIMDVKFIDGQLGVHRVNKKQNGKNKSVYLQIKSLRADFYYVDGAYKFINVPYDMIYKENGIYKLDMEKYQAAKVQKGINGDAEFKFSLHRGEFFSYKKDKEEFWWQFSCVNSDIKNVIETKYIDKPSPGNTQKYRMITIGKKITDMCKYNVDVLGNIYPVDKEILKVEIEM

SEQ ID NO: 5764 - protein, 1064 aa, unidentified
  REGION 1..1064: note = Description of Unknown: uncultivated organism
  REGION 1..1064: note = MG47-14 effector
MNFKLGLDLGVASVGWGIIDENYNIIDSGVRLFSEASAKENVKRREMRSSRRRVRRVRHRLDRMGILLSEILEIDLPEPFGNIYEIRCRGLKEKLKKEELFLALMHLTKRRGTFYLTADDIENKEDNGKSAEEILLEQEIKLKGNYICEIQYKEFLENGKVRGTENRFKNKEYLREVEALLNMQAQFYPVIAEYKDEIYKIYNSKREYFEGPGSEKSPTPYGSYRYDENGNVIKVNLIDLMRGKCTYFPDEKRIAKGAYTAALFNILNDLNNLKIKDRKITEEEKRNLIENYINKGKNITLNYIAKVTGVDVEEISGYRIDKSEKPIFTEFKQYKDILKVFDKFGDRKLVEGNALLCDDIAEVLTKEKSVDIRQSELEKRGVEKNIAAEIAKLSGFTQYHSLSKKAINMIINDLWASDKNQMQLFHDCGLTEYKNSANLGEKIKFDGSEWIVSPITKRTVNEAVKVINACRKMLKQKYNTEFSDIVIEMAREKNLDEKKKMEKDIQKKNELRAKAIHELTSNRKLTPRQFEIINLLLDQDMRSAYSGKAVSLPQVYEGMLEVDHIIPRSISFDDSKNNKVAVFISENQKKAQRTPFMYLKSGEGEISYEKFKEMVLKNTRYSKSKKANLLLENGLPEKEMIGFINRNLVDTRYACRKVLNMLQDYFKINNIDTKVKVIKGSATFAFRKKAKLDKNREESYAHHAQDALIIAGLFNTDLMKKLNCIVDLNEEFINDKENLIFENGKVINKNTGEFISDEDFNASKYIQFIKQVELRKQKYSHKVDRKPNRQLYDQQLKSTRAIIDEKGKEKTYVITKYKNIYAVGVGSTGDKLAERIRKNPESLLMYHNDPETFKKLLEVVNAYPDKKINPFAKYKEEYNQYITKYAKHNNGPIIMDVKFIDGQLGVHRVNKKQNGKNKSVYLQIKSLRADFYYVDGAYKFINVPYDMIYKENGIYKLDLEKYQAAKVQKGINGDAEFKFSLHRGEFFSYKKDKEEFWWQFSCVNSDTKNVIETKYIDKPSPGNTQKYRMITIGKKITDMCKYNVDVLGNIYPVDKEILKVEIEM

SEQ ID NO: 5765 - protein, 1064 aa, unidentified
  REGION 1..1064: note = Description of Unknown: uncultivated organism
  REGION 1..1064: note = MG47-15 effector
MNFKLGLDLGVASVGWGIIDENYNIIDSGVRLFSEASAKENVKRREMRSSRRRVRRVRHRLDRMGILLSEILEIDLPEPFGNIYEIRCRGLKEKLKKEELFLALMHLTKRRGTFYLTADDIENKEDNGKSTEEILLEQEIKLKENYICEIQYKEFLEKGRVRGTENRFKNKEYLHELEALLNMQAQFYPVIAEYKDEIYKIYNSKREYFEGPGSEKSPTPYGSYRYDENGNVIKVNLIDLMRGKCTYFPDEKRIAKGAYTAALFNILNDLNNLKIKDRKITEEEKRNLIENYINKGKNITLNYIAKVTGVDVEEISGYRIDKSEKPIFTELKQYKDILKVFDKFGDRKLVEGNALLCDDIAEVLTKEKSVDIRKSELEKRGIEKNIASEIAKLSGFTQYHSLSKKAINTIIGDLWSTGKNQMQLFHDCGLTEYKNRANLGEKIKFDGSEWIVSPITKRTVTEAVKVINACRKMLKQKYNTEFSDVVIEMAREKNLDEKKKMEKDIQKKNELRAKAIHELTSNRKLTPRQFEIINLLLDQDMRSAYSGKAVSLPQVYEGMLEVDHIIPRSISFDDSKNNKVAVFISENQKKAQRTPFMYLKSGEGEISYEKFKEMVLKNTRYSKSKKANLLLENGLPEKEMIGFINRNLVDTRYACRKVLNMLQDYFKINNIDTKVKVIKGSATFAFRKKAKLDKNREESYAHHAQDALIIAGLFNTDLMKKLNCIVDLNEEFINDKENLIFENGKVINKNTGEFISDEDFNASKYIQFIKQVELRKQKYSHKVDRKPNRQLYDQQLKSTRAIIDEKGKEKTYVITKYKNIYAVGVGSTGDKLAERIRKNPESLLMYHNDPETFKKLLEVVNAYPDKKINPFAKYKEEYNQYITKYAKHNNGPIIMDVKFIDGQLGVHRVNKKQNGKNKSVYLQIKSLRADFYYVDGAYKFINVPYDMIYKENGIYKLDMEKYQAAKVQKGINGDAEFKFSLHRGEFFSYKKDKEEFWWQFSCVNSDTKNVIETKYIDKPSPGNTQKYRMITIGKKITDMCKYNVDVLGNIYPVDKEILKVEIEM

SEQ ID NO: 5766 - protein, 1064 aa, unidentified
  REGION 1..1064: note = Description of Unknown: uncultivated organism
  REGION 1..1064: note = MG47-16 effector
MNFKLGLDLGVASVGWGIIDENYNIIDSGVRLFSEASAKENVKRREMRSSRRRVRRVRHRLDRMGLLLSEILEIDLPEPFGNIYEIRCRGLKEKLKKEELFLALMHLTKRRGTFYLTADDIENKEDNGKSAEEILLEQEIKLKGNYICEIQYKEFLENGKVRGTENRFKNKEYLREVEALLNMQAQFYPVIAEYKDEIYKIYNSKREYFEGPGSEKSPTPYGSYRYDENGNVIKVNLIDLMRGKCTYFPDEKRIAKGAYTAALFNILNDLNNLKIKDRKITEEEKRNLIENYINKGKNITLNYIAKVTGVDVEEISGYRIDKSEKPIFTEFKQYKDILKVFDKFGDRKLVEGNALLCDDIAEVLTKEKSVDIRQSELEKRGVEKNIAAEIAKLSGFTQYHSLSKKAINMIINDLWASDKNQMQLFHDCGLTEYKNSANLGEKIKFDGSEWIVSPITKRTVNEAVKVINACRKMLKQKYNTEFSDIVIEMAREKNLDEKKKMEKDIQKKNELRAKAIHELTSNRKLTPRQFEIINLLLDQDMRSAYSGKAVSLPQVYEGMLEVDHIIPRSISFDDSKNNKVAVFISENQKKAQRTPFMYLKSGEGEISYEKFKEMVLKNTRYSKSKKANLLLENGLPEKEMIGFINRNLVDTRYACRKVLNMLQDYFKINNIDTKVKVIKGSATFAFRKKAKLDKNREESYAHHAQDALIIAGLFNTDLMKKLNCIVDLNEEFINDKENLIFENGKVINKNTGEFISDEDFNASKYIQFIKQVELRKQKYSHKVDRKPNRQLYDQQLKSTRTIIDEKGKEKTYVITKYKNIYAVGVGSTGDKLAERIRKNPESLLMYHNDPETFKKLLEVVNAYPDKKINPFAKYKEEYNQYITKYAKHNNGPIIMDVKFIDGQLGVHRVNKKQNGKNKSVYLQIKSLRADFYYVDGAYKFINVPYDMIYKENGIYKLDLEKYQAAKVQKGINGDAEFKFSLHRGEFFSYKKDKEEFWWQFSCVNSDTKNVIETKYIDKPSPGNTQKYRMITIGKKITDMCKYNVDVLGNIYPVDKEILKVEIEM

SEQ ID NO: 5767 - protein, 1064 aa, unidentified
  REGION 1..1064: note = Description of Unknown: uncultivated organism
  REGION 1..1064: note = MG47-17 effector
MNFKLGLDLGVASVGWGIIDENYNIIDSGVRLFSEASAKENVKRREMRSSRRRVRRVRHRLDRMGLLLSEILEIDLPEPFGNIYEIRCRGLKEKLKKEELFLALMHLTKRRGTFYLTADDIENKEDNGKSAEEILLEQEIKLKGNYICEIQYKEFLENGKVRGTENRFKNKEYLREVEALLNMQAQFYPVIAEYKDEIYKIYNSKREYFEGPGSEKSPTPYGSYRYDENGNVIKVNLIDLMRGKCTYFPDEKRIAKGAYTAALFNILNDLNNLKIKDRKITEEEKRNLIENYINKGKNITLNYIAKVTGVDVEEISGYRIDKSEKPIFTEFKQYKDILKVFDKFGDRKLVEGNALLCDDIAEVLTKEKSVDIRQSELEKRGVEKNIAAEIAKLSGFTQYHSLSKKAINMIINDLWASDKNQMQLFHDCGLTEYKNSANLGEKIKFDGSEWIVSPITKRTVNEAVKVINACRKMLKQKYNTEFSDIVIEMAREKNLDEKKKMEKDIQKKNELRAKAIHELTSNRKLTPRQFEIINLLLDQDMRSAYSGKAVSLPQVYEGMLEVDHIIPRSISFDDSKNNKVAVFISENQKKAQRTPFMYLKSGEGEISYEKFKEMVLKNTRYSKSKKANLLLENGLPEKEMIGFINRNLVDTRYACRKVLNMLQDYFKINNIDTKVKVIKGSATFAFRKKAKLDKNREESYAHHAQDALIIAGLFNTDLMKKLNCIVDLNEEFINDKENLIFENGKVINKNTGEFISDEDFNASKYIQFIKQVELRKQKYSHKVDRKPNRQLYDQQLKSTRTIIDEKGKEKTYVITKYKNIYAVGVGSTGDKLAERIRKNPESLLMYHNDPETFKKLLEVVNAYPDKKINPFAKYKEEYNQYITKYAKHNNGPIIMDVKFIDGQLGVHRVNKKQNGKNKSVYLQIKSLRADFYYVDGAYKFINVPYDMIYKENGIYKLDMEKYQAAKVQKGINGDAEFKFSLHRGEFFSYKKDKEEFWWQFSCVNSDTKNVIETKYIDKPSPGNTQKYRMITIGKKITDMCKYNVDVLGNIYPVDKEILKVEIEM

SEQ ID NO: 5768 - protein, 1067 aa, unidentified
  REGION 1..1067: note = Description of Unknown: uncultivated organism
  REGION 1..1067: note = MG47-18 effector
MYKLGIDIGVSSVGWGIIDDKYNIVDCGVRLFSERSKDSNVDRRGFRSSRRRIRRVKHRLERMKNLLENVLNIKIKQNTFSSNPYAVREKGISEKLSKEELVQAILHLTKRRGTHFLTAEDFENQNGEKTVEKILSEQEANSQDKYVCQMQNEKHMSICTLKQYMGKVRGAENRFRNKKYLEELQQLLKIQANFYPEIEQSKEAIENIYSSKREYWEGPGSEKSPSKYGQYRYGNDGRVIKVNLIDIMRGKCTYYPQEARIAKQSYSACLFNLLNDLNNILINNEKITFEQKQELVEKYIDEGKNINLQAIASVSGVKKELVSGYRIDKDNKAIFTEFKGYKNILKALKVNNLDNQFIKGNRRLVDEIVEIMTKEKDVEKIAADLQQLNGMSADSAGVISQISGISEYHALSLKAINTIIEDLWHTPKNQMVLFAESGLSGKKDRQLKSATIEIDIENWIVSPVVKRSVNETVKIINALRAKMQKEYGAEFEEIVIEMAREKNSEEKKNFINKIQKENEKNRQKIAELMEGKKISGEDFNKIRMLIEQGYKCAYSLRSMSPNDVLLGKAEVDHIIPLSLSFDDSQANKVLVYVSENQEKRQRTPRQYLKSGAGKVSFEEFKDWVCKTFEKNKQKRENLLYEGDPKKDIQGFINRNLVDTRYACKEVLNLLQRYFKQNEISTKVSVIKGGFTAYFRKKAKLSKERDKTFAHHAQDALIVAGLSNSSLLKKLNSIIRDYDLLIQSSDVMDDGKMINKDTGEVLGVIQESDFNSMDYIMFIKRVERVQPKFSHKVDRKPNRELYDQNIKATREQDGDKYIVTKCKNIYTSKDGEKLKELIETTPEKLLMYKHDYQSFEKMQQVVEFYKEAKNPFAEYYKEHNAKIRKYAKEGKYSPEIDNVKYLDKKLGNHRAINNPNSKNLAVLLSIKTLRADIYWDNNKYTFVSVPYDFIITKNNHKGGEVSYDIDLDKYNMAKVNKGISAKAKFLFSLHKGEFVSYIDKNNNYLEWYYSSVNNDSRNKIEVKEIGKPTAKQEMKTIGKDITELTKYHVDILGNRYPIKEEKLKLNNI

SEQ ID NO: 5769 - protein, 1064 aa, unidentified
  REGION 1..1064: note = Description of Unknown: uncultivated organism
  REGION 1..1064: note = MG48-1 effector
MNTTIIFPEDENEQTVLGLDMGSNSIGWFLQTVSANGMPKKIIAAGSRIFDNSRDPKTRVPLSVQKRLANASSTRRDRQIMRTKHLCKLLKEFKLLPPAEVKADVSNRNPYKLRAKAAEEKIDLYGIGRAILHINKRRGFLSNRKADKRANDEEAHGMKLGISNLRTHLADKTLGQYLYERQKSGKGTRMRAKAIKNKNHYEMYADRDMYVDEFQKIWRTQQKYHKNLDDEMGKKIEDALFFQRPLKTPERGFCQFEKGEKRAYKAYPISQKFRILQEVNALEVVNNGVIEVVLTPEDKKKLSEILLKNTSPHIKKGMLSFAEMKKILNIKRVHFFNFEAENRKGFYADSTYAVFASPDCFGDRWEKLDDDLRENIVDLIIQNKEKEFKRIANEQFGFDDEKCEKILDAAMSLEDGTTSLSAKAMHKISKFLEDGELYHSACNMAGYDFNAGYDGELYEKLPYYGEILRTATIGGNTNFDPHENPEKYYGKITNPTVHVALNQLRKLVNKIFEVYGAPDKIVIETARDLPLGEKGLGEINKRNLENKKENEKIGEVLQKLKVANNAKNRMKYRLWCDLNKDETKRCCPFCGKTIPPHKIFSPEFEIEHLLPFSITFDDSRGNKVLSCASCNRIFKGKHSPYEAFANNPSYNWNEIVARVSEMSWARQWRFKPDALKIFEDQFGDFIARMLNDTRYMSKVAREYLTAVLPKEKIITVPGTITGKLRARWGLNRILDTAAENDDESVKNRDDLRHHAVDAFVISSINRKLIALISRTARLAEEAGLENVLKALPSPFEKISYEQLKETIDNIKVSHKLDRGDVKAAIARGATVGKLHKDTAYGKIGKEEDGKLTLVKRVPLMNIEAKRDAIGQIANPQIRDALLEEFDKLAGLSESQIKNRWNEILMQFAEIKHVRRVRIHLKNRESHKLIKIADKSGNIYKYMDNDESYCIDIYKPSKSDKWNFEVINMYDAHKNEIPQWRKNDARAKLVMRLYKRDTIAYEENGEYKIARVTGIATHGQISLLGLQISRVEGNPPKKMPNVLQKLNARKIYIDEIGRVYDPKKK

SEQ ID NO: 5770 - protein, 1043 aa, unidentified
  REGION 1..1043: note = Description of Unknown: uncultivated organism
  REGION 1..1043: note = MG48-2 effector
MGSRIFENSRDPKTRVPLSVERRMAHAMSVRRGRQIMRTRNLCSILRKYGLLPSGENVSVSERNPYKLRAKAVSEKVDMFGIGRAILHMNKRRGFKSNRKADKKSDGAESRGMKLGISKLREAMGDRTLGEFLYERKKSGMGTRMRADAIRGKNEYEIYADRGMYESELRRIWDCQRKYHRNLTDEMLNEISGALFFQRPLKIPERGFCRFEPGERRAYKAYPVSQKFRILQEVNALEILDIAGNGEGITLSMRQKLARALLENDRKIVNKKGIATFAKIKKFLGIPQSLNFNFESESRKGFDGDSTAAVMGSAECFGDAWADMDDCLREKIVDLILADKEGEFAALCAEKFGFGAEKSCAILDAGGELKDGTVSLSAKAMRKILPHLEGGALYHAACAEAGYDFTADYDGERSDLLPYYGKILRTSVLGGNPNFDPEKQPEKYYGKINNPTVHVALNQLRKVYNKLVAVYGRPDMVAVETARELPLGAKGLGELLSEQGKNRGKNLEIAEELKKFGAANNYRNRMKYKLWEDLNPDCIKRACPFCGRPIELQKLFTPEFEIEHLLPFSETFDDTRANKVVSCASCNRILKGNRSPYDAFANRAGYDWNGILSRVSDMPKSKQWRFRPDAWEIFEEKYGDYIARMLNDTRYMSKLAREYLTSVMEPEKILTVTGSATSMLRAKWGLDAILDDSSPLQFGGESESSAVKAPKAPVKNREDHRHHAIDAFVISSLNRKLISAISQCAKRAEQAHLENLFKAIPRAYERISYEKLEAAVKSINVSHKLDRGDAKDALKRGGTVAKLHKETAYGMIGSPYGGKATLAKRVPILSVECDEGQISEIANAKIRADLSRFCEQVSREAATKEEKKSMWARLLGEYCASNKIRRVRIHLPNRELKKLIPISDKKGKVYKYMENAESYCIDIYKPRNSEKWKFEVINMFAAHKNEMPQWRKDDSRAKLVMRLFKRDTIAYEENGEYRLAVVAGMATHGQISLLPLNVAKVEGNPPKKTPSVLQKLNARKVYVDEIGRVFDPYKRENERMQSC

SEQ ID NO: 5771 - protein, 1072 aa, unidentified
  REGION 1..1072: note = Description of Unknown: uncultivated organism
  REGION 1..1072: note = MG48-3 effector
MKYRLGLDIGSSSIGWCIFETVNNIPVRIVDMGVRIFTDGRDPQKKTPLAVERRMARGARRQRDRRLQRINALVKQLKSCGLMPESKDAKKLELKNPYKIRAKAVHEEVSLYELGRALFHINRRRGFKSNRKADKGADENESSAMKKAIKDLNEKLGGQTLGEFLYERQNKGENVRVRAETIKNKNIYDMYADRSMYEKEFDRIWNTQSKFHKELTPELRQKIHYIIFNQRPLKVPERGFCQFEKDERREYLAMPISQIYRIYAEVAQLEIIAFEGDDKRLTPSERNAIANELLFNTKKLAKKDGEITFEKISQKILNLPKSTKFNLQSENRKGLFCDKTAFIISQEECFGADWHKFSFEKQSEIINTILNVSAKPLSDEELEELLSIKYSISKEKAVSILNKAMKLPDGTGSLSALAMSKILPHLKEWNIYNRACALAGYNFNQNYSGEILDKLPYYGQVLKTAALGANPTEENLKFPEKYYGKITNPTVHIALNQVRKVVNKLIDIYGKPDEIVVETARDLPLGEKGISELKKNQEKNKKDNDRIAKELEKVGVKNNYPNRMKFKIWEDLNKDEKQRCCPFCGKQIPLNAVDGLFSRHFEIEHLLPFSETFDDSRNNKVIACKDCNHMYKGKKSPFEAFGHIKDKDNPRNYDAILARAKDFANAEKRLWRFQEDAMRRFKDEESDLIARTMNDTRYMTRATREYLTSIVEAKNVYTVKGVITGLLRNKWGINKLLNDPALPPEEADEKNRNDNRHHAIDAFILCTISRAMIQRIAQSAKLCEEAGYEKIVSDIGKPFDDFDYEEMKKHLDKMLISFKPDRGNALNAVKNNKTLGSLHNETALGAINFKDGDNSLTLAKRIKIETLDFKEKNIEEVADEKIKKDLKAIYEEVVLAGADKKVWVEELSKYAKNNSIRRIRIHLRNRPSEKYIPIKDKNGKIYKYYANAENYCMDIYLPSGEKKWAFQPVSMFEAHQKNYVPKWRKTDPHAKLVMRLFKQDILAFEEDGKTVLRKITGLATHGQISFLPLNVNHIEGNPPKISPSSLQKLNARKVYIDEAGRLFDPGKAKYSE

SEQ ID NO: 5772 - protein, 824 aa, unidentified
  REGION 1..824: note = Description of Unknown: uncultivated organism
  REGION 1..824: note = MG48-4 effector
AERQGDEDESGLKKGIHALEGRLKEAQQTLGQYLHARLEKNAGLEKKLAIRLRKEDADERWTSRQMYRDEFERLMTAQQVYHPQLLTDDVVTALRETIFHQRPLKEAKAGFCALLDGKMRARLAYPQIQRFRIYQEVNNLNTIKEIPDTPEITAEMRQKIIRYLCTDFSELRKDGILSWRKIQKITGIKGVKFNLDELGRPGLQADTTSRSMMAAAPAWWLSLEDEQQRAVVDAVMTAQTDDDLKKQLDALFETLPADIPAALAKIRLPEGYGRISVEAAELLLPPLSLGMIYSDACQWVGINHSDDYDGVVYTKGNLPFYGEVLQKHVIGGTHDVQQRENPEMYYGKINNPTVHMALNQFRRVLNELVQQYGCPPQEIHLELARETALSAKDLEILKKEQTHNKKNNDKINEILRKLGVAESYDNRMKYRLWEDLDNDPSGRCCPLSGKAISLDLLYSPQIEEEHIIPFSRSFDDSRNNKMVCFKSANFLKGNSTPYEAFGQSAQWPDILARAKKMSPDAHKGGKNASGFRVNKFWRFLPDAMEQLQGDAESFLARQLNDTKYMARVARRYAEYVAGKHHVLAIKGKFTSDLRHHWGLDELVGNFSDGQFKKDRSNHHHHAVDAIVIALTDPRMIQELAQANKRAYKQASDKMYLNLPLPFPDFSVAKIKAHLQTLVISHKQDHKHPEQARAQGGSIGQLHKDTNYGHIHGNVYATRIDLIVDEFSKRKNIDEIASRKIREAVMALFEPYADDEGKLKSSNKADYHHDLEAFKKQHDVKRVRIHQTRHNLIPICDSDGHAYRYVDGGNNFCAEIWMPNKGKQA

SEQ ID NO: 5773 - protein, 774 aa, unidentified
  REGION 1..774: note = Description of Unknown: uncultivated organism
  REGION 1..774: note = MG48-5 effector
DITDEHRRKLVEELTRNFQHVNKQGMLTWAKIRKILGLSRAAKFNLDELGRKGLSCDTTSHRLSNPDYLGDRWWTLTDDEKNELVDKLATEPNKDVLEQWLAVRFKLDAETAKKLANTRLAQGYGSVSLKAIRRLLPHLRAGMTYDKACAAEGIDHSDLHTGEIFVNGDLPYYGQLLRRYVIGGDQSFDPHEEPEKYYGKITNPTVHIALNQLRVVINALVRKYGPPSEIHIELARELPLGARGLSQLKSDIARGRKENERIDEELRKIGVVPNYSNRMKFKLWEDLAEQPHERCCPFTGKVISLSALFTDEFEVEHLLPFSLSFDDSRANKVISHRDANRFKGNRSPYEAFGDSPPGYDWDAIIARVENFANPHKKWRFQPDAWEIWKKNNGDVIARMLNDTRYMTRVAREYLSYACPKHKVVSVTGQLTALLRHHWGLNRLLSIEDVKERGDHRHHAIDALVVACTSRSALQKVSAAARNAQSTERLLERLEKPYPKFSFEKLKERIDALVVSYKPDHGKPKPGMTVGQLHEETYYGRLGDSDKKGYGIYVTRRPFTQIEPEAKKIDEIANIQIREDLLAAYERLKGDKKEWQRFLQDYAQANNVRRVRVHIQKSDDVMIPIKDKSGKPYRYVQGGNNYCADIWCTDKGPKAGKWQCEVISMFDAHQPDFRPRWRTEHPTAWRVMRLQINDTVAVEENGQRILVRVKKINSDGRVYLRQLNIAREQGDSLSKGAPASTLQRLNARKIFVSPIGEVKDPGHARKSDKCYGKAS

SEQ ID NO: 5774 - protein, 948 aa, unidentified
  REGION 1..948: note = Description of Unknown: uncultivated organism
  REGION 1..948: note = MG48-6 effector
KSNRKADKKSDGAESRGMKLGISKLREAMGDRTLGEFLYERKKSGMGTRMRADAIRGKNEYEIYADRDMYESELRRIWDCQRKYHRNLTDEMLNEISGALFFQRPLKIPERGFCRFEPGERRAYKAYPVSQKFRILQEVNALEILDIAGNGEGITLSMRQKLARALLENDRKIVNKKGIATFAKIKKFLGIPQSLNFNFESESRKGFDGDSTAAVMGSAECFGDAWADMDDCLREKIVDLILADKEGEFAALCAEKFGFGAEKSCAILDAGGELKDGTVSLSAKAMRKILPHLEGGALYHAACAEAGYDFTADYDGERSDLLPYYGKILRTSVLGGNPNFDPEKQPEKYYGKINNPTVHVALNQLRKVYNKLVAVYGRPDMVAVETARELPLGVKGLGELLSEQGKNRGKNLEIAEELKKFGAANNYRNRMKYKLWEDLNPDCIKRACPFCGRPIELQKLFTPEFEIEHLLPFSETFDDTRANKVVSCASCNRILKGNRSPYDAFANRAGYDWNGILSRVSDMPKSKQWRFRPDAWEIFEEKYGDYIARMLNDTRYMSKLAREYLTSVMEPEKILTVTGSATSMLRAKWGLDAILDDSSPLQFGGESESSAAKAPKAPVKNREDHRHHAIDAFVISSLNRKLISAISQCAKRAEQAHLENLFKAIPRAYERISYEKLEAAVKSINVSHKLDRGDTKGALKRGGTVAKLHKETAYGMIGSPYGGKATLAKRVPILSVECDEGQISEIANAKIRADLSRFCEQVYREAATKEEKKSMWARLLGEYCASNKIRRVRIHLPNRELKKLIPISDKKGKVYKYMENAESYCIDIYKPRNSEKWKFEVINMFAAHKNEMPQWRKDDSRAKLVMRLFKRDTIAYEENGEYRLAVVAGMATHGQISLLPLNVAKVEGNPPKKTPSVLQKLNARKVYVDEIGRVFDPYKRENERMQSC

SEQ ID NO: 5775 - protein, 750 aa, unidentified
  REGION 1..750: note = Description of Unknown: uncultivated organism
  REGION 1..750: note = MG48-7 effector
MDALASSFKIILEKNELKLNLDSIQAFDCLNPHIYYDLLEYAKSIVTDTVVLNDFKKQLDALFETLPADIPAALAKIRLPEGYGRISVEAAELLLPPLSQGMIYSDACQSVGINHSDDYDGVVYTKGNLPFYGEVLQKHVIGGTHDVQQRENAEMYYGKINNPTVHMALNQFRRVLNELVQQYGCPPQEIHLELARETALSAKDLDILKKEQTHNKKNNDKINEILRKLGVAESYDNRMKYRLWEDLDNDPSGRCCPLSGKAISLDLLYSPQIEVEHIIPFSRSFDDSRNNKMVCFKSANFLKGDYTPYEAFGQSVQWPDILARAKKMSPDAHKGGKNASGFRVNKFWRFLPDAMEQLQGDAESFLARQLNDTKYMARVARRYAEYVAGKHYVLAIKGKFTSDLRHHWGLDELVGNFSDGQFKKDRNNHHHHAIDAIVIALTDPRIIQELAQANKRAYKQASDKMYLNLPLPFPDFSVAKIKERLQTLVISHKQDHKRPEQARARGGSIGQLHDETNYGHIHDNVYATRIDLIVDKFSKRKNIDEIASRKIREAVMALFEPYADDKGELKSSNQADYHHDLEAFKEQYGVRRVRIHQTRHNLIPIRDSDGHAYRYVVGGNNFCAEIWMPTKGKQAGKWQCEIIRNFDINQKNFLPKWRQENPTAMKVMRLQINDMVALERDGERVIFRVQKMGMNGQIFLRQHNDSRTEKSTEISFMASTLQSRNARKLFVSPTGKIYDPGRAKQPKRKG

SEQ ID NO: 5776 - protein, 1077 aa, unidentified
  REGION 1..1077: note = Description of Unknown: uncultivated organism
  REGION 1..1077: note = MG48-8 effector
MENEKVFGFDMGANSIGWCVQIIGEDGFTLEILGMGSRIFENSRDPKTRVPLSVERRMAHAMSVRRGRQIMRTRNLCSILRKYGLLPSGENVSVSERNPYKLRAKAVSEKVDMFGIGRAILHMNKRRGFKSNRKADKKSDGAESRGMKLGISKLREAMGDRTLGEFLYERKKSGMGTRMRADAIRGKNEYEIYADRGMYESELRRIWDCQRKYHRNLTDEMLNEISGALFFQRPLKIPERGFCRFEPGERRAYKAYPVSQKIRILQEVNALEILDIAGNGEGITLSMRQKLARALLENDRKIVNKKGIATFAKIKKFLGIPQSLNFNFESESRKGFDGDSTAAVMGSAECFGDAWADMDDCLREKIVDLILADKEGEFAALCAEKFGFGAEKSCAILDAGGELKDGTVSLSAKAMRKILPHLEGGALYHAACAEAGYDFTADYDGERSDLLPYYGKILRTSVLGGNPNFDPEKQPEKYYGKINNPTVHVALNQLRKVYNKLVAVYGRPDMVAVETARELPLGAKGLGELLSEQGKNRGKNLEIAEELKKFGAANNYRNRMKYKLWEDLNPDCIKRACPFCGRPIELQKLFTPEFEIEHLLPFSETFDDTRANKVVSCASCNRILKGNRSPYDAFANRAGYDWNGILSRVSDMPKSKQWRFRPDAWEIFEEKYGDYIARMLNDTRYMSKLAREYLTSVIEPEKILTVTGSATSMLRAKWGLDAILDDSSPLQFGGESESSAVKAPKAPVKNREDHRHHAIDAFVISSLNRKLISAISQCAKRAEQAHLENLFKAIPRAYERISYEKLEAAVKSINVSHKLDRGDAKGALKRGGTVAKLHKETAYGMIGSPYGGKATLAKRVPILSVECDEGQISEIANAKIRADLSRFCEQVYREAATKEEKKSMWARLLGEYCASNKIRRVRIHLPNRELKKLIPISDKKGKVYKYMENAESYCIDIYKPRNSEKWKFEVINMFAAHKNEMPQWRKDDSRAKLVMRLFKRDTIAYEENGEYRLAVVAGMATHGQISLLPLNVAKVEGNPPKKTPSVLQKLNARKVYVDEIGRVFDPYKRENERMQSC

SEQ ID NO: 5777 - protein, 1077 aa, unidentified
  REGION 1..1077: note = Description of Unknown: uncultivated organism
  REGION 1..1077: note = MG48-9 effector
MENEKVFGFDMGANSIGWCVQIIGEDGFTLEILGMGSRIFENSRDPKTRVPLSVERRMAHAMSVRRGRQIMRTRNLCSILRKYGLLPSGENVSVSERNPYKLRAKAVSEKVDMFGIGRAILHMNKRRGFKSNRKADKKSDGAESRGMKLGISKLREAMGDRTLGEFLYERKKSGMGTRMRADAIRGKNEYEIYADRGMYESELRRIWDCQRKYHRNLTDEMLNEISGALFFQRPLKSPERGFCRFEPGERRAYKAYPVSQKFRILQEVNALEILDIAGNGEGITLSMRQKLARALLENDRKIVNKKGIATFAKIKKFLGIPQSLNFNFESESRKGFDGDSTAAVMGSAECFGDAWADMDDCLREKIVDLILADKEGEFAALCAEKFGFGAEKSCAILDAGGELKDGTVSLSAKAMRKILPHLEGGALYHAACAEAGYDFTADYDGERSDLLPYYGKILRTSVLGGNPNFDPEKQPEKYYGKINNPTVHVALNQLRKVYNKLVAVYGRPDMVAVETARELPLGAKGLGELLSEQGKNRGKNLEIAEELKKFGAANNYRNRMKYKLWEDLNPDCIKRAYPFCGRPIELQKLFTPEFEIEHLLPFSETFDDTRANKVVSCASCNRILKGNRSPYDAFANRAGYDWNGILSRVSDMPKSKQWRFRPDAWEIFEEKYGDYIARMLNDTRYMSKLAREYLTSVIEPEKILTVTGSATSMLRAKWGLDAILDDSSPLQFGGESESSAVKAPKAPVKNREDHRHHAIDAFVISSLNRKLISAISQCAKRAEQAHLENLFKAIPRAYERISYEKLEAAVKSINVSHKLDRGDAKGALKRGGTVAKLHKETAYGMIGSPYGGKATLAKRVPILSVECDEGQISEIANAKIRADLSRFCEQVYREAATKEEKKSMWARLLGEYCASNKIRRVRIHLPNRELKKLIPISDKKGKVYKYMENAESYCIDIYKPRNSEKWKFEVINMFAAHKNEMPQWRKDDSRAKLVMRLFKRDTIAYEENGEYRLAVVAGMATHGQISLLPLNVAKVEGNPPKKTPSVLQKLNARKVYVDEIGRVFDPYKRENERMQSC

SEQ ID NO: 5778 - protein, 1077 aa, unidentified
  REGION 1..1077: note = Description of Unknown: uncultivated organism
  REGION 1..1077: note = MG48-10 effector
MENKKVFGFDMGANSIGWCVQIIGEDGFTLEILGMGSRIFENSRDPKTRVPLSVERRMAHAMSVRRGRQIMRTRNLCSILRKYGLLPSCENVSVSERNPYKLRAKAVSEKVDMFGIGRAILHMNKRRGFKSNRKADKKSDGAESRGMKLGISKLREAMGDRTLGEFLYERKKSGMGTRMRADAIRGKNEYEIYADRGMYESELRRIWDCQRKYHRNLTDEMLNEISGALFFQRPLKIPERGFCRFEPGERRAYKAYPVSQKFRILQEVNALEILDIAGGGEGITLSMRQKLARALLENDRKIVNKKGIATFAKIKKFLEIPRSLNFNFESESRKGFDGDSTAAVMGSAECFGDAWADMDDCLREKIVDLILADKEGEFAALCAEKFGFGAEKSCAILDAGGELKDGTVSLSAKAMRKILPHLEGGALYHAACAEAGYDFTADYDGERSDLLPYYGKILRTSVLGGNPNFDPEKQPEKYYGEINNPTVHVALNQLRKVYNKLVAVYGRPDMVAVETARELPLGAKGLGELLSEQGKNRGKNLEIAEELKKFGAANNYRNRMKYKLWEDLNPDCIKRACPFCGRPIELQKLFTPEFEIEHLLPFSETFDDTRANKVVSCASCNRILKGNRSPYDAFANRAGYDWNGILSRVSDMPKSKQWRFRPDAWEIFEEKYGDYIARMLNDTRYMSKLAREYLTSVIEPEKILTVTGSATSMLRAKWGLDAILDDSSPLQFGGESESSAVKAPKAPVKNREDHRHHAIDAFVISSLNRKLISAISQCAKRAEQAHLENLFKAIPRAYERISYEKLEAAVKSINVSHKLDRGDAKGALKRGGTVAKLHKETAYGMIGSPYGGKATLAKRVPILSVECDEGQISEIANAKIRADLSRFCEQVYREAATKEEKKSMWARLLGEYCASNKIRRVRIHLPNRELKKLIPISDKKGKVYKYMENAESYCIDIYKPRNSEKWKFEVINMFAAHKNEMPQWRKDDSRAKLVMRLFKRDTIAYEENGEYRLAVVAGMATHGQISLLPLNVAKVEGNPPKKTPSVLQKLNARKVYVDEIGRVFDPYKRENERMQSC

SEQ ID NO: 5779 - protein, 1077 aa, unidentified
  REGION 1..1077: note = Description of Unknown: uncultivated organism
  REGION 1..1077: note = MG48-11 effector
MENKKVFGFDMGANSIGWCVQIIGEDGFTLEILGMGSRIFENSRDPKTRVPLSVERRMAHAMSVRRGRQIMRTRNLCSILRKYGLLPSCENVSVSERNPYKLRAKAVSEKVDMFGIGRAILHMNKRRGFKSNRKADKKSDGAESRGMKLGISKLREAMGDRTLGEFLYERKKSGMGTRMRADAIRGKNEYEIYADRGMYESELRRIWDCQRKYHRNLTDEMLNEISGALFFQRPLKIPERGFCRFEPGERRAYKAYPVSQKFRILQEVNALEILDIAGGGEGITLSMRQKLARALLENDRKIVNKKGIATFAKIKKFLEIPRSLNFNFESESRKGFDGDSTAAVMGSAECFGDAWADMDDCLREKIVDLILADKEGEFAALCAEKFGFGAEKSCAILDAGGELKDGTVSLSAKAMRKILPHLEGGALYHAACAEAGYDFTADYDGERSDLLPYYGKILRTSVLGGNPNFDPEKQPEKYYGEINNPTVHVALNQLRKVYNKLVAVYGRPDMVAVETARELPLGAKGLGELLSEQGKNRGKNLEIAEELKKFGAANNYRNRMKYKLWEDLNPDCIKRACPFCGRPIELQKLFTPEFEIEHLLPFSETFDDTRANKVVSCASCNRILKGNRSPYDAFANRAGYDWSGILSRVSDMPKSKQWRFRPDAWEIFEEKYGDYIARMLNDTRYMSKLAREYLTSVIEPEKILTVTGSATSMLRAKWGLDAILDDSSPLQFGGESESSAAKAPKAPVKNREDHRHHAIDAFVISSLNRKLISAISQCAKRAEQAHLENLFKAIPRAYERISYEKLEAAVKSINVSHKLDRGDAKGALKRGGTVAKLHKETAYGMIGSPYGGKATLAKRVPILSVECDEGQISEIANAKIRADLSRFCEQVSREAATKEEKKSMWARLLGEYCASNKIRRVRIHLPNRELKKLIPISDKKGKVYKYMENAESYCIDIYKPRNSEKWKFEVINMFAAHKNEMPQWRKDDSRAKLVMRLFKRDTIAYEENGEYRLAVVAGMATHGQISLLPLNVAKVEGNPPKKTPSVLQKLNARKVYVDEIGRVFDPYKRENERMQSC

SEQ ID NO: 5780 - protein, 1077 aa, unidentified
  REGION 1..1077: note = Description of Unknown: uncultivated organism
  REGION 1..1077: note = MG48-12 effector
MENKKVFGFDMGANSIGWCVQIIGEDGFTLEILGMGSRIFENSRDPKTRVPLSVERRMAHAMSVRRGRQIMRTRNLCSILRKYGLLPSCENVSVSERNPYKLRAKAVSEKVDMFGIGRAILHMNKRRGFKSNRKADKKSDGAESRGMKLGISKLREAMGDRTLGEFLYERKKSGMGTRMRADAIRGKNEYEIYADRGMYESELRRIWDCQRKYHRNLTDEMLNEISGALFFQRPLKIPERGFCRFEPGERRAYKAYPVSQKFRILQEVNALEILDIAGGGEGITLSMRQKLARALLENDRKIVNKKGIATFAKIKKFLEIPRSLNFNFESESRKGFDGDSTAAVMGSAECFGDAWADMDDCLREKIVDLILADKEGEFAALCAEKFGFGAEKSCAILDAGGELKDGTVSLSAKAMRKILPHLEGGALYHAACAEAGYDFTADYDGERSDLLPYYGKILRTSVLGGNPNFDPEKQPEKYYGKINNPTVHVALNQLRKVYNKLVAVYGRPDMVAVETARELPLGAKGLGELLSEQGKNRGKNLEIAEELKKFGAANNYRNRMKYKLWEDLNPDCIKRACPFCGRPIELQKLFTPEFEIEHLLPFSETFDDTRANKVVSCASCNRILKGNRSPYDAFANRAGYDWNGILSRVSDMPKSKQWRFRPDAWEIFEEKYGDYIARMLNDTRYMSKLAREYLTSVIEPEKILTVTGSATSMLRAKWGLDAILDDSSPLQFGGESESSAVKAPKAPVKNREDHRHHAIDAFVISSLNRKLISAISQCAKRAEQAHLENLFKAIPRAYERISYEKLEAAVKSINVSHKLDRGDAKGALKRGGTVAKLHKETAYGMIGSPYGGKATLAKRVPILSVECDEGQISEIANAKIRADLSRFCEQVYREAATKEEKKSMWARLLGEYCASNKIRRVRIHLPNRELKKLIPISDKKGKVYKYMENAESYCIDIYKPRNSEKWKFEVINMFAAHKNEMPQWRKDDSRAKLVMRLFKRDTIAYEENGEYRLAVVAGMATHGQISLLPLNVAKVEGNPPKKTPSVLQKLNARKVYVDEIGRVFDPYKRENERMQSC

SEQ ID NO: 5781 - protein, 1077 aa, unidentified
  REGION 1..1077: note = Description of Unknown: uncultivated organism
  REGION 1..1077: note = MG48-13 effector
MENKKVFGFDMGANSIGWCVQIIGEDGFTLEILGMGSRIFENSRDPKTRVPLSVERRMAHAMSVRRGRQIMRTRNLCSILRKYGLLPSGENVSVSERNPYKLRAKAVSEKVDMFGIGRAILHMNKRRGFKSNRKADKKSDGAESRGMKLGISKLREAMGDRTLGEFLYERKKSDMGTRMRADAIRGKNEYEIYADRGMYESELRRIWDCQRKYHRNLTDEMLNEISGALFFQRPLKSPERGFCRFEPGERRAYKAYPVSQKFRILQEVNALEILDIAGNGEGITLSMRQKLARALLENDRKIVNKKGIATFAKIKKFLGIPQSLNFNFESESRKGFDGDSTAAVMGSAECFGDAWADMDDCLREKIVDLILADKEGEFAALCAEKFGFGAEKSCAILDAGGELKDGTVSLSAKAMRKILPHLEGGALYHAACAEAGYDFTADYDGERSDLLPYYGKILRTSVLGGNPNFDPEKQPEKYYGKINNPTVHVALNQLRKVYNKLVAVYGRPDMVAVETARELPLGAKGLGELLSEQGKNRGKNLEIAEELKKFGAANNYRNRMKYKLWEDLNPDCIKRACPFCGRPIELQKLFTPEFEIEHLLPFSETFDDTRANKVVSCASCNRILKGNRSPYDAFANRAGYDWNGILSRVSDMPKSKQWRFRPDAWEIFEEKYGDYIARMLNDTRYMSKLAREYLTSVIEPEKILTVTGSATSMLRAKWGLDAILDDSSPLQFGGESESSAAKAPKAPVKNREDHRHHAIDAFVISSLNRKLISAISQCAKRAEQAHLENLFKAIPRAYERISYEKLEAAVKSINVSHKLDRGDAKGALKRGGTVAKLHKETAYGMIGSPYGGKATLAKRVPILSVECDEGQISEIANAKIRADLSRFCEQVYREAATKEEKKSMWARLLGEYCTSNKIRRVRIHLPNRELKKLIPISDKKGKVYKYMENAESYCIDIYKPRNSEKWKFEVINMFAAHKNEMPQWRKDDSRAKLVMRLFKRDTIAYEENGEYRLAVVAGMATHGQISLLPLNVAKVEGNPPKKTPSVLQKLNARKVYVDEIGRVFDPYKRENERMQSC

SEQ ID NO: 5782 - protein, 1077 aa, unidentified
  REGION 1..1077: note = Description of Unknown: uncultivated organism
  REGION 1..1077: note = MG48-14 effector
MENKKVFGFDMGANSIGWCVQIIGEDGFTLEILGMGSRIFENSRDPKTRVPLSVERRMAHAMSVRRGRQIMRTRNLCSILRKYGLLPSGENVSVSERNPYKLRAKAVSEKVDMFGIGRAILHMNKRRGFKSNRKADKKSDGAESRGMKLGISKLREAMGDRTLGEFLYERKKSGMGTRMRADAIRGKNEYEIYADRGMYESELRRIWDCQRKYHRNLTDEMLNEISGALFFQRPLKIPERGFCRFEPGERRAYKAYPVSQKIRILQEVNALEILDIAGNGEGITLSMRQKLARALLENDRKIVNKKGIATFAKIKKFLGIPQSLNFNFESESRKGFDGDSTAAVMGSAECFGDAWADMDDCLCEKIVDLILADKEGEFAALCAEKFGFGAEKSCAILDAGGELKDGTVSLSAKAMRKILPHLEGGALYHAACAEAGYDFTADYDGERSDLLPYYGKILRTSVLGGNPNFDPEKQPEKYYGKINNPTVHVALNQLRKVYNKLVAVYGRPDMVAVETARELPLGAKGLGELLSEQGKNRGKNLEIAEELKKFGAANNYRNRMKYKLWEDLNPDCIKRACPFCGRPIELQKLFTPEFEIEHLLPFSETFDDTRANKVVSCASCNRILKGNRSPYDAFANRAGYDWNGILSRVSDMPKSKQWRFRPDAWEIFEEKYGDYIARMLNDTRYMSKLAREYLTSVIEPEKILTVTGSATSMLRAKWGLDAILDDSSPLQFGGESESSAAKAPKAPVKNREDHRHHAIDAFVISSLNRKLISAISQCAKRAEQAHLENLFKAIPRAYERISYEKLEAAVKSINVSHKLDRGDAKGALKRGGTVAKLHKETAYGMIGSPYGGKATLAKRVPILSVECDEGQISEIANAKIRADLSRFCEQVYREAATKEEKKSMWARLLGEYCASNKIRRVRIHLPNRELKKLIPISDKKGKVYKYMENAESYCIDIYKPRNSEKWKFEVINMFAAHKNEMPQWRKDDSRAKLVMRLFKRDTIAYEENGEYRLAVVAGMATHGQISLLPLNVAKVEGNPPKKTPSVLQKLNARKVYVDEIGRVFDPYKRENERMQSC

SEQ ID NO: 5783 - protein, 1077 aa, unidentified
  REGION 1..1077: note = Description of Unknown: uncultivated organism
  REGION 1..1077: note = MG48-15 effector
MENKKVFGFDMGANSIGWCVQIIGEDGFTLEILGMGSRIFENSRDPKTRVPLSVERRMAHAMSVRRGRQIMRTRNLCSILRKYGLLPSGENVSVSERNPYKLRAKAVSEKVDMFGIGRAILHMNKRRGFKSNRKADKKSDGAESRGMKLGISKLREAMGDRTLGEFLYERKKSGMGTRMRADAIRGKNEYEIYADRGMYESELRRIWDCQRKYHRNLTDEMLNEISGALFFQRPLKSPERGFCRFEPGERRAYKAYPVSQKFRILQEVNALEILDIAGNGEGITLSMRQKLARALLENDRKIVNKKGIATFAKIKKFLGIPQSLNFNFESESRKGFDGDSTAAVMGSAECFGDAWADMDDCLREKIVDLILADKEGEFAALCAEKFGFGAEKSCAILDAGGELKDGTVSLSAKAMRKILPHLEGGALYHAACAEAGYDFTADYDGERSDLLPYYGKILRTSVLGGNPNFDPEKQPEKYYGKINNPTVHVALNQLRKVYNKLVAVYGRPDMVAVETARELPLGAKGLGELLSEQGKNRGKNLEIAEELKKFGAANNYRNRMKYKLWEDLNPDCIKRACPFCGRPIELQKLFTPEFEIEHLLPFSETFDDTRANKVVSCASCNRILKGNRSPYDAFANRAGYDWNGILSRVSDMPKSKQWRFRPDAWEIFEEKYGDYIARMLNDTRYMSKLAREYLTSVIEPEKILTVTGSATSMLRAKWGLDAILDDSSPLQFGGESESSAVKAPKAPVKNREDHRHHAIDAFVISSLNRKLISAISQCAKRAEQAHLENLFKAIPRAYERISYEKLEAAVKSINVSHKLDRGDAKGALKRGGTVAKLHKETAYGMIGSPYGGKATLAKRVPILSVECDEGQISEIANAKIRADLSRFCEQVYREAATKEEKKSMWARLLGEYCASNKIRRVRIHLPNRELKKLIPISDKKGKVYKYMENAESYCIDIYKPRNSEKWKFEVINMFAAHKNEMPQWRKDDSRAKLVMRLFKRDTIAYEENGEYRLAVVAGMATHGQISLLPLNVAKVEGNPPKKTPSVLQKLNARKVYVDEIGRVFDPYKRENERMQSC

SEQ ID NO: 5784 - protein, 1077 aa, unidentified
  REGION 1..1077: note = Description of Unknown: uncultivated organism
  REGION 1..1077: note = MG48-16 effector
MENKKVFGFDMGANSIGWCVQIIGEDGFTLEILGMGSRIFENSRDPKTRVPLSVERRMAHAMSVRRGRQIMRTRNLCSILRKYGLLPSGENVSVSERNPYKLRAKAVSEKVDMFGIGRAILHMNKRRGFKSNRKADKKSDGAESRGMKLGISKLREAMGDRTLGEFLYERKKSGMGTRMRADAIRGKNEYEIYADRGMYESELRRIWDCQRKYHRNLTDEMLNEISGALFFQRPLKSPERGFCRFEPGERRAYKAYPVSQKFRILQEVNALEILDIAGNGEGITLSMRQKLARALLENDRKIVNKKGIATFAKIKKFLGIPQSLNFNFESESRKGFDGDSTAAVMGSAECFGDAWADMDDCLREKIVDLILADKEGEFAALCAEKFGFGAEKSCAILDAGGELKDGTVSLSAKAMRKILPHLEGGALYHAACAEAGYDFTADYDGERSDLLPYYGKILRTSVLGGNPNFDPEKQPEKYYGKINNPTVHVALNQLRKVYNKLVAVYGRPDMVAVETARELPLGAKGLGELLSEQGKNRGKNLEIAEELKKFGAANNYRNRMKYKLWEDLNPDCIKRACPFCGRPIELQKLFTPEFEIEHLLPFSETFDDTRANKVVSCASCNRILKGNRSPYDAFANRAGYDWNGILSRVSDMPKSKQWRFRPDAWEIFEEKYGDYIARMLNDTRYMSKLAREYLTSVIEPEKILTVTGSATSMLRAKWGLDAILDDSSPLQFGGESESSAVKAPKAPVKNREDHRHHAIDAFVISSLNRKLISAISQCAKRAEQAHLENLFKAIPRAYERISYEKLEAAVKSINVSHKLDRGDAKGALKRGGTVAKLHKETAYGMIGSPYGGKATLAKRVPILSVECDEGQISEIANAKIRADLSRFCEQVYRGAATKEEKKSMWARLLGEYCASNKIRRVRIHLPNRELKKLIPISDKKGKVYKYMENAESYCIDIYKPRNSEKWKFEVINMFAAHKNEMPQWRKDDSRAKLVMRLFKRDTIAYEENGEYRLAVVAGMATHGQISLLPLNVAKVEGNPPKKTPSVLQKLNARKVYVDEIGRVFDPYKRENERMQSC

SEQ ID NO: 5785 - protein, 1077 aa, unidentified
  REGION 1..1077: note = Description of Unknown: uncultivated organism
  REGION 1..1077: note = MG48-17 effector
MENKKVFGFDMGANSIGWCVQIIGEDGFTLEILGMGSRIFENSRDPKTRVPLSVERRMAHAMSVRRGRQIMRTRNLCSILRKYGLLPSGENVSVSERNPYKLWAKAVSEKVDMFGIGRAILHMNKRRGFKSNRKADKKSDGAESRGMKLGISKLREAMGDRTLGEFLYERKKSGMGTRMRADAIRGKNEYEIYADRDMYESELRRIWDCQRKYHRNLTDEMLNEISGALFFQRPLKIPERGFCRFEPGERRAYKAYPVSQKFRILQEVNALEILDIAGNGEGITLSMRQKLARALLENDRKIVNKKGIATFAKIKKFLGIPQSLNFNFESESRKGFDGDSTAAVMGSAECFGDAWADMDDCLREKIVDLILADKEGEFAALCAEKFGFGAEKSCAILDAGGELKDGTVSLSAKAMRKILPHLEGGALYHAACAEAGYDFTADYDGERSDLLPYYGKILRTSVLGGNPNFDPEKQPEKYYGKINNPTVHVALNQLRKVYNKLVAVYGRPDMVAVETARELPLGVKGLGELLSEQGKNRGKNLEIAEELKKFGAANNYRNRMKYKLWEDLNPDCIKRACPFCGRPIELQKLFTPEFEIEHLLPFSETFDDTRANKVVSCASCNRILKGNRSPYDAFANRAGYDWNGILSRVSDMPKSKQWRFRPDAWEIFEEKYGDYIARMLNDTRYMSKLAREYLTSVMEPEKILTVTGSATSMLRAKWGLDAILDDSSPLQFGGESESSAAKAPKAPVKNREDHRHHAIDAFVISSLNRKLISAISQCAKRAEQAHLENLFKAIPRAYERISYEKLEAAVKSINVSHKLDRGDTKGALKRGGTVAKLHKETAYGMIGSPYGGKATLAKRVPILSVECDEGQISEIANAKIRADLSRFCEQVYREAATKEEKKSMWARLLGEYCASNKIRRVRIHLPNRELKKLIPISDKKGKVYKYMENAESYCIDIYKPRNSEKWKFEVINMFAAHKNEMPQWRKDDSRAKLVMRLFKRDTIAYEENGEYRLAVVAGMATHGQISLLPLNVAKVEGNPPKKTPSVLQKLNARKVYVDEIGRVFDPYKRENERMQSC

SEQ ID NO: 5786 - protein, 1077 aa, unidentified
  REGION 1..1077: note = Description of Unknown: uncultivated organism
  REGION 1..1077: note = MG48-18 effector
MKNKKVFGFDMGANSIGWCVQIIGEDGFTLEILGMGSRIFENSRDPKTRVPLSVERRMAHAMSVRRGRQIMRTRNLCSILRKYGLLPSCENVSVSERNPYKLRAKAVSEKVDMFGIGRAILHMNKRRGFKSNRKADKKSDGAESRGMKLGISRLREAMGDRTLGEFLYERKKSGMGTRMRADAIRGKNEYEIYADRGMYESELRRIWDCQRKYRRNLTDEMLNEISGALFFQRPLKIPERGFCRFEPGERRAYKAYPVSQNFRILQEVNALEILDIAGGGEGITLSMRQKLARALLENDRKIVNKKGIATFAKIKKFLEIPQSLNFNFESESRKGFDGDSTAAVMGSAECFGDAWADMDDCLREKIVDLILADKEGEFAALCAEKFGFGAEKSCAILDAGGELKDGTVSLSAKAMRKILPHLEGGALYHAACAEAGYDFTADYDGERSDLLPYYGKILRTSVLGGNPNFDPEKQPEKYYGKINNPTVHVALNQLRKVYNKLVAVYGRPDMVAVETARELPLGAKGLGELLSEQGKNRGKNLEIAEELKKFGAANNYRNRMKYKLWEDLNPDCIKRACPFCGRPIELQKLFTPEFEIEHLLPFSETFDDTRANKVVSCASCNRILKGNRSPYDAFANRAGYDWNGILSRVSDMPKSKQWRFRPDAWEIFEEKYGDYIARMLNDTRYMSKLAREYLTSVIEPEKILTVTGSATSMLRAKWGLDAILDDSSPLQFGGESESSAAKAPKAPVKNREDHRHHAIDAFVISSLNRKLISAISQCAKRAEQAHLENLFKAIPRAYERISYEKLEAAVKSINVSHKLDRGDAKGALKRGGTVAKLHKETAYGMIGSPYGGKATLAKRVPILSVECDEGQISEIANAKIRADLSRFCEQVYREAATKEEKKSMWARLLGEYCASNKIRRVRIHLPNRELKKLIPISDKKGKVYKYMENAESYCIDIYKPRNSEKWKFEVINMFAAHKNEMPQWRKDDSRAKLVMRLFKRDTIAYEENGEYRLAVVAGMATHGQISLLPLNVAKVEGNPPKKTPSVLQKLNARKVYVDEIGRVFDPYKRENERMQSC

SEQ ID NO: 5787 - protein, 1074 aa, unidentified
  REGION 1..1074: note = Description of Unknown: uncultivated organism
  REGION 1..1074: note = MG48-19 effector
MKYRLGLDIGSSSIGWCIFETVNNIPVRIVDMGVRIFTDGRDPQKKTPLAVERRMARGARRQRDRRLQRINALVKQLKSCGLMPESKDAKKLELKNPYKIRAKAVHEEVSLYELGRALFHINRRRGFKSNRKADKGADENESSAMKKAIKDLNEKLGGQTLGEFLYERQNKGENVRVRAETIKNKNIYDMYADRSMYEKEFDRIWNTQSKFHKELTPELRQKIHYIIFNQRPLKVPERGFCQFEKDERREYLAMPISQIYRIYAEVAQLEIIAFEGDDKRLTPSERNAIANELLLNTKKLAKKDGEITFEKISQKILNLPKSTKFNLQSENRKGLFCDKTAFIMSQEECFGADWHKFSFEKQSEIINTILNVSAKPLSDEELEELLSIKYSISKEKAVSILNKAMKLPDGTGSLSALAMSKILPHLKEWNIYNRACALAGYNFNQNYSGEILDKLPYYGQVLKTAALGANPTEENLKFPEKYYGKITNPTVHIALNQVRKVVNKLIDIYGKPDEIVVETARDLPLGEKGISELKKNQEKNKKDNDRIAKELEKVGAKNNYQNRMKFKIWEDLNKDEKQRCCPFCGKQIPLNAIDGLFSRHFEIEHLLPFSETFDDSRNNKVIACKDCNHMYKGKKSPFEAFGHIKDKDNPRNYDAILARAKDFVNAEKRLWRFQEDAMRRFKDEESDLIARTMNDTRYMTRATREYLTSIVEAKNVYTVKGVITGLLRNKWGINKLLNDPALPPEEADEKNRNDNRHHAIDAFILCTISRAMIQRIAQSAKLCEEAGYEKIVSDIGKPFDDFDYEEMKKHLDKMLISFKPDRGNAVNAVKNNKTLGSLHNETALGAINFKDGSKTLTLAKRIKIETLDFKEKNIEEVADEKIKKDLKAIYEEVILAGADKKVWVEKLSKYAKNNSIRRIRIHLRNNELSTLIPIKDKNGKIYKYYANAENYCMDIYLPSGEKKWHFKPVSMFEAHQKNYIPKWRKTDPHAKLVMRLFKQDILAFEENGNIVYKRITSIWGSGVIQLMPLNKNFIDKDDKRTSKTPSSLQKLNARKVYIDEAGRLFDPGKAKYSE

SEQ ID NO: 5788 - protein, 1074 aa, unidentified
  REGION 1..1074: note = Description of Unknown: uncultivated organism
  REGION 1..1074: note = MG48-20 effector
MKYRLGLDIGSSSIGWCIFETVNNIPVRIVDMGVRIFTDGRDPQKKTPLAVERRMARGARRQRDRRLQRINALVKQLKSCGLMPESKDAKKLELKNPYKIRAKAVHEEVSLYELGRALFHINRRRGFKSNRKADKGADENESSAMKKAIKDLNEKLGGQTLGEFLYERQNKGENVRVRAETIKNKNIYDMYADRSMYEKGFDRIWNTQSKFHKELTPELRQKIHYIIFNQRPLKVPERGFCQFEKDERREYLAMPISQIYRIYAEVAQLEIIAFEGDDKRLTPSERNAIANELLLNTKKLAKKDGEITFEKISQKILNLPKSTKFNLQSENRKGLFCDKTAFIMSQEECFGADWHKFSFEKQSEIINTILNVSAKPLSDEELEELLSIKYSISKEKAVSILNKAMKLPDGTGSLSALAMSKILPHLKEWNIYNRACALAGYNFNQNYSGEILDKLPYYGQVLKTAALGANPTEENLKFPEKYYGKITNPTVHIALNQVRKVVNKLIDIYGKPDEIVVETARDLPLGEKGISELKKNQEKNKKDNDRIAKELEKVGVKNNYQNRMKFKIWEDLNKDEKQRCCPFCGKQIPLNAIDGLFSRHFEIEHLLPFSETFDDSRNNKVIACKDCNHMYKGKKSPFEAFGHIKDKDNPRNYDAILARAKDFVNAEKRLWRFQEDAMRRFKDEESDLIARTMNDTRYMTRATREYLTSIVEAKNVYTVKGVITGLLRNKWGINKLLNDPALPPEEADEKNRNDNRHHAIDAFILCTISRAMIQRIAQSAKLCEDAGYEKIVSDIGKPFDDFDYEEMKKHLDKMLISFKPDRGNAVNAVKNNKTLGSLHNETALGAINFKDGDNSLTLAKRIKIETLDFKEKNIEEVADEKIKKDLKAIYEEVVLAGADKKVWVEELSKYAKNNSIRRIRIHLRNRPSEKYIPIKDKNGKIYKYYANAENYCMDIYLPSGEKKWHFQPVSMFEAHQKNYVPKWRKTDPHAKLVMRLFKQDILAFEENGNIVYKRITSIWGSGVIQLMPLNKNFIDKDDKRTSKTPSSLQKLNARKVYIDEAGRLFDPGKAKYSE

SEQ ID NO: 5789 - protein, 1066 aa, unidentified
  REGION 1..1066: note = Description of Unknown: uncultivated organism
  REGION 1..1066: note = MG48-21 effector
MNTTIIFPEDENEQTVLGLDMGSNSIGWFLQTVSANGMPKKIIAAGSRIFDNSRDPKTRVPLSVQKRLANASSTRRDRQIMRTKHLCKLLKEFKLLPSAEGKADVSNRNPYKLRAKAAEEKIDLYGIGRAILHINKRRGFLSNRKADKRANDEEAHGMKLGISNLRMHLADKTLGQYLYERQKSGKGTRMRAKAIKNKNHYEMYADRDMYVDEFQKIWRTQQKYHKNLDDEMGKKIEDALFFQRPLKTPERGFCQFEKGEKRAYKAYPISQKFRILQEVNALEVVNNGVIEVVLTPEDKKKLSEILLKNTSPHIKKGMLSFAEMKKILNIKRVHFFNFEAENRKGFYADSTYAVFASPDCFGDRWEKLDDDLRENIIDLIIQNKEKEFKKIASEQFGFDDERCEKILDAAMSLEDGTTSLSAKAMRKISKFLEDGALYHSACNMAGYDFNAGYEGKLYKELPYYGEILRTATIGGNTKFNPENKNEKEKYYGKITNPTVHVALNQLRKLVNKIFHVYGAPDKIVIETARDLPLGEKGLSEINKNNAKNKKENERIAEELEKLNVANNAKNRMKYRLWEDLNPDPQKRCCPFCGKQIPPHKIFSPEFEIEHLLPFSITFDDSRGNKVLSCASCNRIFKGKHSPYEAFGNNPSYNWNEIVARVSEMSWARQWRFKPDALKIFEDQFGDFIARMLNDTRYMSKVAREYLTAVLPKEKIITVPGTITGKLRARWGLNRILDTAAESDDESVKNRDDLRHHAVDAFVISSINRKLIALISRTARLAEEAGLENVLKALPSPFEKISYEQLKETIDNIKVSHKLDRGDVKAAIARGATVGKLHKDTAYGKIGKEEDGKLTLVKRVPLMNIEAKRDAIGQIANPQIRDALLEEFDKLAGLSESQIKNRWNEILMQFAEIKHVRRVRIHLKNRESHKLIKIADKSGNIYKYMDNDESYCIDIYKPSKSDKWSFEVINMYDAHKNEIPQWRKNDARAKLVMRLYKRDTIAYEENGEYKIARVTGIATHGQISLLGLQISRVEGNPPKKMPNVLQKLNARKIYIDEIGRVYDPKKK

SEQ ID NO: 5790 - protein, 1073 aa, unidentified
  REGION 1..1073: note = Description of Unknown: uncultivated organism
  REGION 1..1073: note = MG48-22 effector
MNYRLGFDLGYTSLGWACVLLDGQNHPCEVYDFGVRIFPSGRDNQSRQPTSVERRKKRGARRNRDRYLARRTQLLAQMIAFGLQPPSKSERSELAKQEPLALRAKGINEPLTPFELGRALFHLNQRRGFQSNRIAERQGDEDESGLKKGIHALEGRLKEAQQTLGQYLHARLEKNAGLERKLAIRLRKEDADERWTSRQMYRDEFERLMAAQQVYHPQLLTDDVVTALRETIFHQRPLKEAKAGFCALLDGKMRARLAYPQIQRFRIYQEVNNLNTIKEIPDTPEITAEMRQKIIRYLCTDFSELRKDGILSWRKIQKITGIKGVKFNLDELGRPGLQADTTSRSMMAAAPAWWLSLEDEQQRAVVDAVMTAQTDDDLKKQLDALFETLPADIPAALAKIRLPEGYGRISIEAAELLLPPLSQGMIYSDACQSAGINHSDDYDGVVYTKGNLPFYGEVLQKHVIGGTHDVQQRENPEMYYGKINNPTVHMALNQFRRVLNELVQQYGCPPQEIHLELARETALSAKDLEILKKEQTHNKKNNDKINEILRKLGVAESYDNRMKYRLWEDLDNDPSGRCCPLSGKAISLDLLYSPQIEEEHIIPFSRSFDDSRNNKMVCFKSANFLKGNSTPYEAFGQSAQWPDILARAKKMSPDAHKGGKNASGFRVNKFWRFLPDAMEQLQGDAESFLARQLNDTKYMARVARRYAEYVAGKHHVLAIKGKFTSDLRHHWGLDELVGNFSDGQFKKDRSNHHHHAVDAIVIALTDPRMIQELAQANKRAYKQASDKMYLNLPLPFPDFSVAKIKAHLQTLVISHKQDHKHPEQARAQGGSIGQLHKDTNYGHIHGNVYATRIDLIVDEFSKRKNIDEIASRKIREAVMALFEPYADDEGKLKSSNKADYHHDLEAFKKQHDVKRVRIHQTRHNLIPICDSDGHAYRYVDGGNNFCAEIWMPNKGKQAGKWQCEIIRNFDVNQKNFLPKWRQENPTAMKVMRLQINDMVALDRDGKRVIFRVQKMGMNGQIFLRQHNDSRTEKSTEISFMASTLQSRNARKLFVSPTGKIYDPGRAKQPKQKG

SEQ ID NO: 5791 - protein, 1073 aa, unidentified
  REGION 1..1073: note = Description of Unknown: uncultivated organism
  REGION 1..1073: note = MG48-23 effector
MNYRLGFDLGYTSLGWACVLLDGQNHPCEVYDFGVRIFPSGRENKSKQPTSVERRKKRGARRNRDRYLARRTQLLAQMIAFGLQPPSKSERSELAKQEPLALRAKGINEPLTPFELGRALFHLNQRRGFQSNRIAERQGDEDESGLKKGIHALEGRLKEAQQTLGQYLHARLEKNAGLEKKLAIRLRKEDADERWTSRQMYRDEFERLMAAQQVYHPQLLTDDVVTALRETIFHQRPLKEAKAGFCALLDGKMRARLAYPQIQRFRIYQEVNNLNTIKETPDTLEITAEMRQKIIRYLCTDFSELRKDGILSWSKIQKITGIKGVKFNLDELGRPGLQADTTSRAMMAAVPAWWLSLEDEQQRAVVDAVMTAQTDDDLKKQLDALFETLPADIPAALAKIRLPEGYGRISVEAAELLLPPLSQGMIYSDACQSVGINHSDDYDGVVYIKGNLPFYGEVLQKHVIGGTHDVQQRENAEMYYGKINNPTVHMALNQFRRVLNELVQQYGCPPQEIHLELARETALSAKDLAKLKTEQTNNKKNNDKINEILRKLGVAESYGNRMKYRLWEDLDNDPSGRCCPLSGKAISLDLLYSPQIEEEHIIPFSRSFDDSRNNKMVCFKSDNFLKGDYTPYEAFGHKAQWPDILARAKKMSPDAHKGGKNASGFRVNKFWRFLPDAMEQLQGDAESFLARQLNDTKYMARVARRYAEYVAGKHHVLAIKGKFTSDLRHHWGLDELVGNFSDGQFKKDRSNHHHHAIDAIVIALTDPRMIQELAQANKRAYKQASDKMYLGLPLPFPDFSVAKIKERLQTLVISHKQDHKRPEQARAQGGSIGQLHEETNYGHIHDNVYATREDLNVEKFSNQSDIDEIASRKIREAVMALFEPYADDKGKLKSSNKADYHHDLEAFKKQHGVRRVRIHQTRHNLISIRDSDGHAYRYVVGGNNFCAEIWMPNKGKQADKWQCEIIRNFDINQKNFLPRWRQENPTAMKVMRLQINDMVALERNGERVICRVQKMYKSGEIILRHHNDSENAPKTQISTKASSLQSQNARKLFVSPTGKIYDPGRAKQPKRKD

SEQ ID NO: 5792 - protein, 1073 aa, unidentified
  REGION 1..1073: note = Description of Unknown: uncultivated organism
  REGION 1..1073: note = MG48-24 effector
MNYRLGFDLGYTSLGWACVLLDGQNHPCEVYDFGVRIFPSGRENKSKQPTSVERRKKRGARRNRDRYLARRTQLLAQMIAFGLQPPSKSERSELAKQEPLALRAKGINEPLTPFELGRALFHLNQRRGFQSNRIAERQGDEDESGLKKGIHALEGRLKEAQQTLGQYLHARLEKNAGLEKKLAIRLRKEDADERWTSRQMYRDEFERLMTAQQVYHPQLLTDDVVTALRETIFHQRPLKEAKAGFCALLDGKMRARLAYPQIQRFRIYQEVNNLNTIKETPDTLEITAEMRQKIIRYLCTDFSELRKDGILSWRKIQKITGIKGVKFNLDELGRPGLQADTTSRSMMAAAPAWWLSLEDEQQRAVVDAVMTAQTDDDLKKQLDALFETLPADIPAALAKIRLPEGYGRISIEAAELLLPPLSQGMIYSDACQSAGINHSDDYDGVVYTKGNLPFYGEVLQKHVIGGTHDVQQRENPEMYYGKINNPTVHMALNQFRRVLNELVQQYGCPPQEIHLELARETALSAKDLEILKKEQTHNKKNNDKINEILRKLGVAESYDNRMKYRLWEDLDNDPSGRCCPLSGKAISLDLLYSPQIEEEHIIPFSRSFDDSRNNKMVCFKSANFLKGNSTPYEAFGQSAQWPDILARAKKMSPDAHKGGKNASGFRVNKFWRFLPDAMEQLQGDAESFLARQLNDTKYMARVARRYAEYVAGKHHVLAIKGKFTSDLRHHWGLDELVGNFSDGQFKKDRSNHHHHAVDAIVIALTDPRMIQELAQANKRAYKQASDKMYLNLPLPFPDFSVAKIKAHLQTLVISHKQDHKHPEQARAQGGSIGQLHKDTNYGHIHGNVYATRIDLIVDEFSKRKNIDEIASRKIREAVMALFEPYADDEGKLKSSNKADYHHDLEAFKKQHDVKRVRIHQTRHNLIPICDSDGHAYRYVDGGNNFCAEIWMPNKGKQAGKWQCEIIRNFDVNQKNFLPKWRQENPTAMKVMRLQINDMVALDRDGKRVIFRVQKMGMNGQIFLRQHNDSRTEKSTEISFMASTLQSRNARKLFVSPTGKIYDPGRAKQPKQKG

SEQ ID NO: 5793 - protein, 1057 aa, unidentified
  REGION 1..1057: note = Description of Unknown: uncultivated organism
  REGION 1..1057: note = MG48-25 effector
MNYRLGFDLGYTSLGWACVLLDGQNHPCEVYDFGVRIFPSGRENKSKQPTSVERRKKRGARRNRDRYLARRTQLLAQMIAFGLQPPSKSERSELAKQEPLALRAKGINEPLTPFELGRALFHLNQRRGFQSNRIAERQGDEDESGLKKGIHALEGRLKEAQQTLGQYLHARLEKNAGLERKLAIRLRKEDADERWTSRQMYRDEFERLMAAQQVYHPQLLTDDVVTALRETIFHQRPLKEAKAGFCALLDGKMRARLAYPQIQRFRIYQEVNNLNTIKETPDTLEITAEMRQKIIRYLCTDFSELRKDGILSWSKIQKITGIKGVKFNLDELGRPGLQADTTSRAMMAAVPAWWLSLEDEQQRAVVDAVMTAQTDDDLKKQLDALFETLPADIPAALAKIRLPEGYGRISIEAAELLLPPLSQGMIYSDACQSAGINHSDDYDGVVYTKGNLPFYGEVLQKHVIGGTHDVQQRENAEMYYGKINNPTVHMALNQFRRVLNELVQQYGCPPQEIHLELARETALSAKDLAKLKTEQTNNKKNNDKINEILRKLGVAESYGNRMKYRLWEDLDNDPSGRCCPLSGKAISLDLLYSPQIEEEHIIPFSRSFDDSRNNKMVCFKSDNFLKGDYTPYEAFGHKAQWPDILARAKKMSPDAHKGGKNASGFRVNKFWRFLPDAMEQLQGDAESFLARQLNDTKYMARVARRYAEYVAGKHHVLAIKGKFTSDLRHHWGLDELVGNFSDGQFKKDRNNHHHHAIDAIVIALTDPRIIQELAQANKRAYKQASDKMYLNLPLPFPDFSVAKIKERLQTLVISHKQDHKRPEQARARGGSIGQLHDETNYGHIHDNVYATRIDLIVDKFSKRKNIDEIASRKIREAVMALFEPYADDKGELKSSNQADYHHDLEAFKEQYGVRRVRIHQTRHNLIPIRDSDGHAYRYVVGGNNFCAEIWMPNKGKQADKWQCEIIRNFDINQKNFLPRWRQENPTAMKVMRLQINDMVALERNGERVICRVQKMYKSGEIILRHHNDSENAPKTQISTKASSLQSQNARKLFVSPT

SEQ ID NO: 5794 - protein, 755 aa, unidentified
  REGION 1..755: note = Description of Unknown: uncultivated organism
  REGION 1..755: note = MG48-26 effector
MNYRLGFDLGYTSLGWACVLLDGQNHPCEVYDFGVRIFPSGRENKSKQPTSVERRKKRGARRNRDRYLARRTQLLAQMIAFGLQPPSKSERSELAKQEPLALRAKGINEPLTPFELGRALFHLNQRRGFQSNRIAERQGDEDESGLKKGIHALEGRLKEAQQTLGQYLHARLEKNAGLERKLAIRLRKEDADERWTSRQMYRDEFERLMAAQQVYHPQLLTDDVVTALRETIFHQRPLKEAKAGFCALLDGKMRARLAYPQIQRFRIYQEVNNLNTIKETPDTLEITAEMRQKIIRYLCTDFSELRKDGILSWSKIQKITGIKGVKFNLDELGRPGLQADTTSRAMMAAVPAWWLSLEDEQQRAVVDAVMTAQTDDDLKKQLDALFETLPADIPAALAKIRLPEGYGRISIEAAELLLPPLSQGMIYSDACQSVGINHSDDYDGVVYIKGNLPFYGEVLQKHVIGGTHDVQQRENAEMYYGKINNPTVHMALNQFRRVLNELVQQYGCPPQEIHLELARETALSAKDLAKLKTEQTNNKKNNDKINEILRKLGVAESYDNRMKYRLWEDLDNDPSGRCCPLSGKAISLDLLYSPQIEEEHIIPFSRSFDDSRNNKMVCFKSDNFLKGDYTPYEAFGHKAQWPDILARAKKMSPDAHKGGKNASGFRVNKFWRFLPDAMEQLQGDAESFLARQLNDTKYMARVARRYAEYVAGKHHVLAIKGKFTSDLRHHWGLDELVGNFSDGQFKKDRSNHHHH

SEQ ID NO: 5795 - protein, 1073 aa, unidentified
  REGION 1..1073: note = Description of Unknown: uncultivated organism
  REGION 1..1073: note = MG48-27 effector
MNYRLGFDLGYTSLGWACVLLDGQNHPCEVYDFGVRIFPSGRENKSKQPTSVERRKKRGARRNRDRYLARRTQLLAQMIAFGLQPPSKSERSELAKQEPLALRAKGINEPLTPFELGRALFHLNQRRGFQSNRIAERQGDEDESGLKKGIHALEGRLKEAQQTLGQYLHARLEKNAGLERKLAIRLRKEDADERWTSRQMYRDEFERLMAAQQVYHPQLLTDDVVTALRETIFHQRPLKEAKAGFCALLDGKMRARLAYPQIQRFRIYQEVNNLNTIKETPDTLEITAEMRQKIIRYLCTDFSELRKDGILSWSKIQKITGIKGVKFNLDELGRPGLQADTTSRAMMAAVPAWWLSLEDEQQRAVVDAVMTAQTDDDLKKQLDALFETLPADIPAALAKIRLPEGYGRISIEAAELLLPPLSQGMIYSDACQSVGINHSDDYDGVVYIKGNLPFYGEVLQKHVIGGTHDVQQRENAEMYYGKINNPTVHMALNQFRRVLNELVQQYGCPPQEIHLELARETALSAKDLAKLKTEQTNNKKNNDKINEILRKLGVAESYGNRMKYRLWEDLDNDPSGRCCPLSGKAISLDLLYSPQIEEEHIIPFSRSFDDSRNNKMVCFKSDNFLKGDYTPYEAFGHKAQWPDILARAKKMSPDAHKGGKNASGFRVNKFWRFLPDAMEQLQGDAESFLARQLNDTKYMARVARRYAEYVAGKHHVLAIKGKFTSDLRHHWGLDELVGNFSDGQFKKDRSNHHHHAIDAIVIALTDPRMIQELAQANKRAYKQASDKMYLGLPLPFPDFSVAKIKERLQTLVISHKQDHKRPEQARAQGGSIGQLHEETNYGHIHDNVYATREDLNVEKFSNQSDIDEIASRKIREAVMALFEPYADDKGKLKSSNKADYHHDLEAFKKQHGVRRVRIHQTRHNLISIRDSDGHAYRYVVGGNNFCAEIWMPNKGKQADKWQCEIIRNFDINQKNFLPRWRQENPTAMKVMRLQINDMVALERNGERVICRVQKMYKSGEIILRHHNDSENAPKTQISTKASSLQSQNARKLFVSPTGKIYDPGRAKQPKRKD

SEQ ID NO: 5796 - protein, 1073 aa, unidentified
  REGION 1..1073: note = Description of Unknown: uncultivated organism
  REGION 1..1073: note = MG48-28 effector
MNYRLGFDLGYTSLGWACVLLDGQNHPCEVYDFGVRIFPSGRENKSKQPTSVERRKKRGARRNRDRYLARRTQLLAQMIAFGLQPPSKSERSELAKQEPLALRAKGINEPLTPFELGRALFHLNQRRGFQSNRIAERQGDEDESGLKKGIHALEGRLKEAQQTLGQYLHARLEKNAGLERKLAIRLRKEDADERWTSRQMYRDEFERLMAAQQVYHPQLLTDDVVTALRETIFHQRPLKEAKAGFCALLDGKMRARLAYPQIQRFRIYQEVNNLNTIKETPDTLEITAEMRQKIIRYLCTDFSELRKDGILSWSKIQKITGIKGVKFNLDELGRPGLQADTTSRAMMAAVPAWWLSLEDEQQRAVVDAVMTAQTDDDLKKQLDALFETLPADIPAALAKIRLPEGYGRISVEAAELLLPPLSQGMIYSDACQSVGINHSDDYDGVVYIKGNLPFYGEVLQKHVIGGTHDVQQRENAEMYYGKINNPTVHMALNQFRRVLNELVQQYGCPPQEIHLELARETALSAKDLAKLKTEQTNNKKNNDKINEILRKLGVAESYGNRMKYRLWEDLDNDPSGRCCPLSGKAISLDLLYSPQIEEEHIIPFSRSFDDSRNNKMVCFKSDNFLKGDYTPYEAFGHKAQWPDILARAKKMSPDAHKGGKNASGFRVNKFWRFLPDAMEQLQGDAESFLARQLNDTKYMARVARRYAEYVAGKHHVLAIKGKFTSDLRHHWGLDELVGNFSDGQFKKDRSNHHHHAIDAIVIALTDPRMIQELAQANKRAYKQASDKMYLGLPLPFPDFSVAKIKERLQTLVISHKQDHKRPEQARAQGGSIGQLHEETNYGHIHDNVYATREDLNVEKFSNQSDIDEIASRKIREAVMALFEPYADDKGKLKSSNKADYHHDLEAFKKQHGVRRVRIHQTRHNLISIRDSDGHAYRYVVGGNNFCAEIWMPNKGKQADKWQCEIIRNFDINQKNFLPRWRQENPTAMKVMRLQINDMVALERNGERVICRVQKMYKSGEIILRHHNDSENAPKTQISTKASSLQSQNARKLFVSPTGKIYDPGRAKQPKRKD

SEQ ID NO: 5797 - protein, 1073 aa, unidentified
  REGION 1..1073: note = Description of Unknown: uncultivated organism
  REGION 1..1073: note = MG48-29 effector
MNYRLGFDLGYTSLGWACVLLDGQNHPCEVYDFGVRIFPSGRENKSKQPTSVERRKKRGARRNRDRYLARRTQLLAQMIAFGLQPPSKSERSELAKQEPLALRAKGINEPLTPFELGRALFHLNQRRGFQSNRIAERQGDEDESGLKKGIHALEGRLKEAQQTLGQYLHARLEKNAGLERKLAIRLRKEDADERWTSRQMYRDEFERLMAAQQVYHPQLLTDDVVTALRETIFHQRPLKEAKAGFCALLDGKMRARLAYPQIQRFRIYQEVNNLNTIKETPDTLEITAEMRQKIIRYLCTDFSELRKDGILSWSKIQKITGIKGVKFNLDELGRPGLQADTTSRSMMAAVPAWWLSLEDEQQRAVVDAVMTAQTDDDLKKQLDALFETLPADIPAALAKIRLPEGYGRISIEAAELLLPPLSQGMIYSDACQSVGINHSDDYDGVVYIKGNLPFYGEVLQKHVIGGTHDVQQRENAEMYYGKINNPTVHMALNQFRRVLNELVQQYGCPPQEIHLELARETALSAKDLAKLKTEQTNNKKNNDKINEILRKLGVAESYGNRMKYRLWEDLDNDPSGRCCPLSGKAISLDLLYSPQIEEEHIIPFSRSFDDSRNNKMVCFKSDNFLKGDYTPYEAFGHKAQWPDILARAKKMSPDAHKGGKNASGFRVNKFWRFLPDAMEQLQGDAESFLARQLNDTKYMARVARRYAEYVAGKHHVLAIKGKFTSDLRHHWGLDELVGNFSDGQFKKDRSNHHHHAIDAIVIALTDPRMIQELAQANKRAYKQASDKMYLGLPLPFPDFSVAKIKERLQTLVISHKQDHKRPEQARAQGGSIGQLHEETNYGHIHDNVYATREDLNVEKFSNQSDIDEIASRKIREAVMALFEPYADDKGKLKSSNKADYHHDLEAFKKQHGVRRVRIHQTRHNLISIRDSDGHAYRYVVGGNNFCAEIWMPNKGKQADKWQCEIIRNFDINQKNFLPRWRQENPTAMKVMRLQINDMVALERNGERVICRVQKMYKSGEIILRHHNDSENAPKTQISTKASSLQSQNARKLFVSPTGKIYDPGRAKQPKRKD

SEQ ID NO: 5798 - protein, 1073 aa, unidentified
  REGION 1..1073: note = Description of Unknown: uncultivated organism
  REGION 1..1073: note = MG48-30 effector
MNYRLGFDLGYTSLGWACVLLDGQNHPCEVYDFGVRIFPSGRENKSKQPTSVERRKKRGARRNRDRYLARRTQLLAQMIAFGLQPPSKSERSELAKQEPLALRAKGINEPLTPFELGRALFHLNQRRGFQSNRIAERQGDEDESGLKKGIHALEGRLKEAQQTLGQYLHARLEKNAGLERKLAIRLRKEDADERWTSRQMYRDEFERLMAAQQVYHPQLLTDDVVTALRETIFHQRPLKEAKAGFCALLDGKMRARLAYPQIQRFRIYQEVNNLNTIKETPDTPEITAEMRQKIIRYLCTDFSELRKDGILSWSKIQKITGIKGVKFNLDELGRPGLQADTTSRAMMAAVPAWWLSLEDEQQRAVVDAVMTAQTDDDLKKQLDALFETLPADIPAALAKVRLPEGYGRISVEAAELLLPPLSLGMIYSDACQSVGINHSDDYDGVVYIKGNLPFYGEVLQKHVIGGTHDVQQRENAEMYYGKINNPTVHMALNQFRRVLNELVQQYGCPPQEIHLELARETALSAKDLAKLKTEQTNNKKNNDKINEILRKLGVAESYGNRMKYRLWEDLDNDPSGRCCPLSGKAISLDLLYSPQIEEEHIIPFSRSFDDSRNNKMVCFKSDNFLKGDYTPYEAFGHKAQWPDILARAKKMSPDAHKGGKNASGFRVNKFWRFLPDAMEQLQGDAESFLARQLNDTKYMARVARRYAEYVAGKHHVLAIKGKFTSDLRHHWGLDELVGNFSDGQFKKDRSNHHHHAIDAIVIALTDPRMIQELAQANKRAYKQASDKMYLGLPLPFPDFSVAKIKERLQTLVISHKQDHKRPEQARAQGGSIGQLHEETNYGHIHDNVYATREDLNVEKFSNQSDIDEIASRKIREAVMALFEPYADDKGKLKSSNKADYHHDLEAFKKQHGVRRVRIHQTRHNLISIRDSDGHAYRYVVGGNNFCAEIWMPNKGKQADKWQCEIIRNFDINQKNFLPRWRQENPTAMKVMRLQINDMVALERNGERVICRVQKMYKSGEIILRHHNDSENAPKTQISTKASSLQSQNARKLFVSPTGKIYDPGRAKQPKRKD

SEQ ID NO: 5799 - protein, 1055 aa, unidentified
  REGION 1..1055: note = Description of Unknown: uncultivated organism
  REGION 1..1055: note = MG48-31 effector
MNYRLGFDLGYTSLGWACVLLDGQNHPCEVYDFGVRIFPSGRENKSKQPTSVERRKKRGARRNRDRYLARRTQLLAQMIAFGLQPPSKSERSELAKQEPLALRAKGINEPLTPFELGRALFHLNQRRGFQSNRIAERQGDEDESGLKKGIHALEGRLKEAQQTLGQYLHARLEKNAGLERKLAIRLRKEDADERWTSRQMYRDEFERLMAAQQVYHPQLLTDDVVTALRETIFHQRPLKEAKAGFCALLDGKMRARLAYPQIQRFRIYQEVNNLNTIKETPDTPEITAEMRQKIIRYLCTDFSELRKDGILSWSKIQKITGIKGVKFNLDELGRPGLQADTTSRAMMAAVPAWWLSLEDEQQRAVVDAVMTAQTDDDLKKQLDALFETLPADIPAALAKVRLPEGYGRISVEAAELLLPPLSLGMIYSDACQSVGINHSDDYDGVVYTKGNLPFYGEVLQKHVIGGTHDVQQRENAEMYYGKINNPTVHMALNQFRRVLNELVQQYGCPPQEIHLELARETALSAKDLAKLKTEQTNNKKNNDKINEILRKLGVAESYGNRMKYRLWEDLDNDPSGRCCPLSGKAISLDLLYSPQIEEEHIIPFSRSFDDSRNNKMVCFKSDNFLKGDYTPYEAFGHKAQWPDILARAKKMSPDAHKGGKNASGFRVNKFWRFLPDAMEQLQGDAESFLARQLNDTKYMARVARRYAEYVAGKHHVLAIKGKFTSDLRHHWGLDELVGNFSDGQFKKDRSNHHHHAIDAIVIALTDPRMIQELAQANKRAYKQASDKMYLGLPLPFPDFSVAKIKERLQTLVISHKQDHKRPEQARAQGGSIGQLHEETNYGHIHDNVYATREDLNVEKFSNQSDIDEIASRKIREAVMALFEPYADDKGKLKSSNKADYHHDLEAFKKQHGVRRVRIHQTRHNLISIRDSDGHAYRYVVGGNNFCAEIWMPNKGKQADKWQCEIIRNFDINQKNFLPRWRQENPTAMKVMRLQINDMVALERNGERVICRVQKMYKSGEIILRHHNDSENAPKTQISTKASSLQSQNARKLFVW

SEQ ID NO: 5800 - protein, 1073 aa, unidentified
  REGION 1..1073: note = Description of Unknown: uncultivated organism
  REGION 1..1073: note = MG48-32 effector
MNYRLGFDLGYTSLGWACVLLDGQNHPCEVYDFGVRIFPSGRENKSKQPTSVERRKKRGARRNRDRYLARRTQLLAQMIAFGLQPPSKSERSELAKQEPLALRAKGINEPLTPFELGRALFHLNQRRGFQSNRIAERQGDEDESGLKKGIHALEGRLKEAQQTLGQYLYARLEKNAGLEKKLAIRLRKEDADERWTSRQMYRDEFECLMTAQQVYHPQLLTDDVVTALRETIFHQRPLKEAKAGFCALLDGKMRARLAYPQIQRFRIYQEVNNLNTIKETPDTPEITAEMRQKIIRYLCTDFSELRKDGILSWSKIQKITGIKGVKFNLDELGRPGLQADTTSRSMMAAVPAWWLSLEDEQQRAVVDAVMTAQTDDDLKKQLDALFETLPADIPAALAKIRLPEGYGRISVEAAELLLPPLSQGMIYSDACQSAGINHSDDYDGVVYTKGNLPFYGEVLQKHVIGGTHDVQQRENAEMYYGKINNPTVHMALNQFRRVLNELVQQYGCPPQEIHLELARETALSAKDLDILKKEQTHNKKNNDKINEILRKLGVAESYDNRMKYRLWEDLDNDPSGRCCPLSGKAISLDLLYSPQIEVEHIIPFARSFDDSRNNKMVCFKSANFLKGDYTPYEAFGQSVQWPDILARAKKMSPDAHKGGKNASGFRVNKFWRFLPDAMEQLQGDAESFLARQLNDTKYMARVARRYAEYVAGKHYVLAIKGKFTSDLRHHWGLDELVGNFSDGQFKKDRNNHHHHAIDAIVIALTDPRIIQELAQANKRAYKQASDKMYLNLPLPFPDFSVAKIKERLQTLVISHKQDHKRPEQARARGGSIGQLHDETNYGHIHDNVYATRIDLIVDKFSKRKNIDEIASRKIREAVMALFEPYADDKGELKSSNQADYHHDLEAFKEQYGVRRVRIHQTRHNLIPIRDSDGHAYRYVVGGNNFCAEIWMPTKGKQAGKWQCEIIRNFDINQKNFLPKWRQENPTAMKVMRLQINDMVALERDGERVIFRVQKMGMNGQIFLRQHNDSRTEKSTEISFMASTLQSRNARKLFVSPTGKIYDPGRAKQPKRKG

SEQ ID NO: 5801 - protein, 1073 aa, unidentified
  REGION 1..1073: note = Description of Unknown: uncultivated organism
  REGION 1..1073: note = MG48-33 effector
MNYRLGFDLGYTSLGWACVLLDGQNHPCEVYDFGVRIFPSGRENKSKQPTSVERRKKRGARRNRDRYLARRTQLLAQMIAFGLQPPSKSERSELAKQEPLALRAKGINEPLTPFELGRALFHLNQRRGFQSNRIAERQGDEDESGLKKGIHALEGRLKEAQQTLGQYLYARLEKNAGLEKKLAIRLRKEDADERWTSRQMYRDEFECLMTAQQVYHPQLLTDDVVTALRETIFHQRPLKEAKAGFCALLDGKMRARLAYPQIQRFRIYQEVNNLNTIKETPDTPEITAEMRQKIIRYLCTDFSELRKDGILSWSKIQKITGIKGVKFNLDELGRPGLQADTTSRSMMAAVPAWWLSLEDEQQRAVVDAVMTAQTDDDLKKQLDALFETLPADIPAALAKIRLPEGYGRISVEAAELLLPPLSQGMIYSDACQSAGINHSDDYDGVVYTKGNLPFYGEVLQKHVIGGTHDVQQRENAEMYYGKINNPTVHMALNQFRRVLNELVQQYGCPPQEIHLELARETALSAKDLDILKKEQTHNKKNNDKINEILRKLGVAESYDNRMKYRLWEDLDNDPSGRCCPLSGKAISLDLLYSPQIEVEHIIPFSRSFDDSRNNKMVCFKSANFLKGDYTPYEAFGQSVQWPDILARAKKMSPDAHKGGKNASGFRVNKFWRFLPDAMEQLQGDAESFLARQLNDTKYMARVARRYAEYVAGKHYVLAIKGKFTSDLRHHWGLDELVGNFSDGQFKKDRNNHHHHAIDAIVIALTDPRIIQELAQANKRAYKQASDKMYLNLPLPFPDFSVAKIKERLQTLVISHKQDHKRPEQARARGGSIGQLHDETNYGHIHDNVYATRIDLIVDKFSKRKNIDEIASRKIREAVMALFEPYADDKGELKSSNQADYHHDLEAFKEQYGVRRVRIHQTRHNLIPIRDSDGHAYRYVVGGNNFCAEIWMPTKGKQAGKWQCEIIRNFDINQKNFLPKWRQENPTAMKVMRLQINDMVALERDGERVIFRVQKMGMNGQIFLRQHNDSRTEKSTEISFMASTLQSRNARKLFVSPTGKIYDPGRAKQPKRKG

SEQ ID NO: 5802 - protein, 870 aa, unidentified
  REGION 1..870: note = Description of Unknown: uncultivated organism
  REGION 1..870: note = MG48-34 effector
MNYRLGFDLGYTSLGWACVLLDGQNHPCEVYDFGVRIFPSGRENKSKQPTSVERRKKRGARRNRDRYLARRTQLLAQMIAFGLQPPSKSERSELAKQEPLALRAKGINEPLTPFELGRALFHLNQRRGFQSNRIAERQGDEDESGLKKGIHALEGRLKEAQQTLGQYLYARLEKNAGLERKLAIRLRKEDADERWTSRQMYRDEFECLMTAQQVYHPQLLTDDVVTALRETIFHQRPLKEAKAGFCALLDGKMRARLAYPQIQRFRIYQEVNNLNTIKETPDTLEITAEMRQKIIRYLCTDFSELRKDGILSWSKIQKITGIKGVKFNLDELGRPGLQADTTSRSMMAVVPTWWLSLEDEQQRVVVDAVMTAQTDDDLKKQLDALFETLPADIPAALAKVRLPEGYGRISVEAAELLLPPLSLGMIYSDACQSVGINHSDDYDGVVYIKGNLPFYGEVLQKHVIGGTHDVQQRENAEMYYGKINNPTVHMALNQFRRVLNELVQQYGCPPQEIHLELARETALSAKDLAKLKTEQTNNKKNNDKINEILRKLGVAESYGNRMKYRLWEDLDNDPSGRCCPLSGKAISLDLLYSPQIEVEHIIPFSRSFDDSRNNKMVCFKSDNFLKGDYTPYEAFGHKAQWPDILARAKKMSPDAHKGGKNASGFRVNKFWRFLPDAMEQLQGDAESFLARQLNDTKYMARVARRYAEYVAGKHHVLAIKGKFTSDLRHHWGLDELVGNFSDGQFKKDRSNHHHHAIDAIVIALTDPRMIQELAQANKRAYKQASDKMYLGLPLPFPDFSVAKIKERLQTLVISHKQDHKRPEQARAQGGSIGQLHEETNYGHIHDNVYATREDLNVEKFSNQSDIDEIA

SEQ ID NO: 5803 - protein, 899 aa, unidentified
  REGION 1..899: note = Description of Unknown: uncultivated organism
  REGION 1..899: note = MG48-35 effector
MYKRQIRGKNEYEIYADRDMYESELRRIWDCQRKYHRNLTDEMLNEISGALFFQRPLKIPERGFCRFEPGERRAYKAYPVSQKFRILQEVNALEILDIAGNGEGITLSMRQKLARALLENDRKIVNKKGIATFAKIKKFLGIPQSLNFNFESESRKGFDGDSTAAVMGSAECFGDAWADMDDCLREKIVDLILADKEGEFAALCAEKFGFGAEKSCAILDAGGELKDGTVSLSAKAMRKILPHLEGGALYHAACAEAGYDFTADYDGERSDLLPYYGKILRTSVLGGNPNFDPEKQPEKYYGEINNPTVHVALNQLRKVYNKLVAVYGRPDMVAVETARELPLGAKGLGELLSEQGKNRGKNLEIAEELKKFGAANNYRNRMKYKLWEDLNPDCIKRACPFCGRPIELQKLFTPEFEIEHLLPFSETFDDTRANKVVSCASCNRILKGNRSPYDAFANRAGYDWNGILSRVSDMPKSKQWRFRPDAWEIFEEKYGDYIARMLNDTRYMSKLAREYLTSVIEPEKILTVTGSATSMLRAKWGLDAILDDSSPLQFGGESESSAVKAPKAPVKNREDHRHHAIDAFVISSLNRKLISAISQCAKRAEQAHLENLFKAIPRAYERISYEKLEAAVKSINVSHKLDRGDAKGALKRGGTVAKLHKETAYGMIGSPYGGKATLAKRVPILSVECDEGQISEIANAKIRADLSRFCEQVYREAATKEEKKSMWARLLGEYCASNKIRRVRIHLPNRELKKLIPISDKKGKVYKYMENAESYCIDIYKPRNSEKWKFEVINMFAAHKNEMPQWRKDDSRAKLVMRLFKRDTIAYEENGEYRLAVVAGMATHGQISLLPLNVAKVEGNPPKKTPSVLQKLNARKVYVDEIGRVFDPYKRENERMQSC

SEQ ID NO: 5804 - protein, 947 aa, unidentified
  REGION 1..947: note = Description of Unknown: uncultivated organism
  REGION 1..947: note = MG48-36 effector
RGFQSNRIAERQGDEDESGLKKGIHALEGRLKEAQQTLGQYLYARLEKNAGLEKKLAIRLRKEDADERWTSRQMYRDEFECLMTAQQVYHPQLLTDDVVTALRETIFHQRPLKEAKAGFCALLDGKMRARLAYPQIQRFRIYQEVNNLNTIKETPDTPEITAEMRQKIIRYLCTDFSELRKDGILSWSKIQKITGIKGVKFNLDELGRPGLQADTTSRSMMAAVPAWWLSLEDEQQRAVVDAVMTAQTDDDLKKQLDALFETLPADIPAALAKIRLPEGYGRISVEAAELLLPPLSQGMIYSDACQSAGINHSDDYDGVVYTKGNLPFYGEVLQKHVIGGTHDVQQRENAEMYYGKINNPTVHMALNQFRRVLNELVQQYGCPPQEIHLELARETALSAKDLDILKKEQTHNKKNNDKINEILRKLGVAASYDTRMKSRLWEDLDNDPSGRCCPLSGTALSLDLLYSPQIEVEHIIPFSRSFDDSRNNKMVCFKSANFLKGDYTPYEAFGQSVQWPDILARAKKMSPDAHKGGKNASGFRVNKFWRFLPDAMEQLQGDAESFLARQLNDTKYMARVARRYAEYVAGKHYVLAIKGKFTSDLRHHWGLDELVGNFSDGQFKKDRNNHHHHAIDAIVIALTDPRIIQELAQANKRAYKQASDKMYLNLPLPFPDFSVAKIKERLQTLVISHKQDHKRPEQARARGGSIGQLHDETNYGHIHDNVYATRIDLIVDKFSKRKNIDEIASRKIREAVMALFEPYADDKGELKSSNQADYHHDLEAFKEQYGVRRVRIHQTRHNLIPIRDSDGHAYRYVVGGNNFCAEIWMPTKGKQAGKWQCEIIRNFDINQKNFLPKWRQENPTAMKVMRLQINDMVALERDGERVIFRVQKMGMNGQIFLRQHNDSRTEKSTEISFMASTLQSRNARKLFVSPTGKIYDPGRAKQPKRKG

SEQ ID NO: 5805 - protein, 1068 aa, unidentified
  REGION 1..1068: note = Description of Unknown: uncultivated organism
  REGION 1..1068: note = MG49-1 effector
MYRLGLDIGTTSVGAAILNIDHYGEPNRIIDMHVRTFEAAENPNDGSSLAAPRREARGARRRNRRHKHRLDRIKALIQSEGIYTKEKLDSLYHAKGNILMDIYQIRYESLERKLNNEELTRLLIHFAQRRGFKSNRKNEKKGSDEGKLLAATADNEKYLKEKGYRTVGEMLWKDERFAENKRNKGGDYSNTFLRSQLKEEIGIIFEKQKAFGSLYVTDAFSEKYLEILFSQRAFEEGPGGESPYAGNQIEKMVGKCPFEKEEKRASKATYTFELFNLWQKMNSIGILQDGIKRRLTDDERNKLFALCHKTEKVDYKRIRKELEMGQDALFSNLTYGRKEVEEVEAAKFQYLPVYHEMRKAFDKISKNHILQISNTQRDLIGTAITYYKTDDKIQQALLEGNFSKEEINAILGMKNFSKFGSLSVKAMQKVIPYLEKGLTYDKACEQAGYDFRAHSVAEKKKYLPKLPGDTYDITSPVVKRAINQTIKVVNEIIKRHGSPAAVNIELAREMSKSFKDRKRIEKEQNDNAAQNQRIYDEIKDTFHVAQPSGQDIVKYKLWQEQDCKCVYTGQPIKAENLFVPGYYEVDHIIPYSISFDDSYTNKVLVLTKANRDKGNRIPMQYVADKEEYEIRVNTLIKNRAKREKLLKPILTEEDIGEMKQRSLQDTQFITRFMMNYIKDYLLFDEAYDRKQRVTAVNGRVTAYMRKRWGINKVREDGDLHHSVDAVVVACITPGIVRTVTEYAKREENRYLNKDDAVMREKFPMPWPEFSTELDIRTCKEPKEMLRKVSLANYQDVDIDSIKPIFVSRMTKKKVTGQAHKETIRAYREVDGKMRTVTKTPIQELKLDKDGEIEGYYNPSSDILLYELLRSRLKEAGGNGKKAFPEGFVYKPTPNGGVAPKVKKVKIYDVSNLNIPVNHGVAANGNMVRIDLYYVEGEGYYFIPIYISDLIKKELPKKACVPHKEYHDWKNMKDEDFLYSIYPNDLLYIKSSTPKKFTKKKGEKKDSFEAEEAFVYYREAKISGATITVVTHDNNYTIQSLGVKTLSRIEKYHVDVLGNKYKAAVEERK

SEQ ID NO: 5806 - protein, 1090 aa, unidentified
  REGION 1..1090: note = Description of Unknown: uncultivated organism
  REGION 1..1090: note = MG49-2 effector
MYRIGLDIGIASVGWAVLETNSDGNPMRIIDLGSYVFDAAEDPKTGASLAKPRRDARGARRRLRRHKFRLQRIKKHIVRYGILSRDELEHLYDVPGEDIYRIRVEALDRALDDQEFARLLIHLAQRRGFRSNRRVDAKDQDEGKLLSAVNENARLMKERGYRTVGEMLYKDPKFSTAKRNKEESYSNTVSRSQMEDEVRRIFEAQRKCGNQKASEELEKEYLDIYLSQRSFEEGPGGNAGDYCPYSGNQIEKMVGHCTFEPDEKRAVKASYTFERANLLQNINKMQLIDENGEMYPLNEEQRHALVERAHQTASLDYSKIRKTLNLKETERFAYVDYNQKSTIENAEKKQKFEYLKHYHELRKALNSVEKDLIQKCPVQVRDEIGTILTYYKTDLKIRAALDKIEDPFLTEEVKDAVMGMSGCSGVGSLSLKALNNIMPYLEQGMMYDKAAEAAGYNFRGHDRYNKGMYLPTLSEDDDIRNPVVRRAVSQTIKVVNAIIKKYGKPVAINVELARETARTFEDRQKILKQQKKNREANQKTKRLLQEEFHLLSPSHLDILKDRLFKEQDGICLYSGEKIDRTRLFEDGYVQIDHIVPYSISWDDSYSNKVLVMTRENQQKGNRLPMEYLNGKKQDEFCVRVERQIRDLRKKTNLLMKSIPADKKESFKDRNLNDTKYICRFMLNYLNDHLLFDQSVDMGKRVTALNGSVTAYLRKRWGLNKVRGNGDKHHALDAVVIGCINNSLIMRVTQYFKHRENFLFEPEQHVQKKAEVPSPWPNFREEVEFRMADNPKAFYDRLSTKISLTNYSEEELEQVKPIFVSRMKVKKKTGSANDATIRGLKVLEDGQMVAISKVPLSTLRLDKNGEIKDYYHKEDDQLLYNALKDRLKEYGGSGEKAFTEPFYKPKANGDQGPLVRKVKTAKKITNGVVLNHGEGIASNGSMLRADFYRKNGKYYAVPVYVKDMVKDHLPDRAVTLKHPYDQWDKMDDNDFLFSLYPNDVVYIKFNVKNNKYQELHLVNKDSTLPEKKEFRELHGYYKSFDIATNSIKIITDDNCYYGKGIGIKTLPEIKKCAVDVLGNLIPVARETRKHR

SEQ ID NO: 5807 - protein, 1025 aa, unidentified
  REGION 1..1025: note = Description of Unknown: uncultivated organism
  REGION 1..1025: note = MG49-3 effector
GSSLAAPRREARGARRRNRRHKHRLDRIKALIQSEGIYTKEKLDSLYHAKGNILMDIYQIRYESLERKLNNEELTRLLIHFAQRRGFKSNRKNEKKGSDEGKLLAATADNEKYLKEKGYRTVGEMLWKDERFAENKRNKGGDYSNTFLRSQLREEIGIIFEKQKAFGSLYVTDAFSEKYLKILFSQRAFEEGPGEESPYAGNQIEKMVGKCTFEKEEKRASKATYTFELFNLWQKINSIGILQDGMKRRLTDDERNKLFALCHKAEKVDYKRIRKELELGQDALFSNLTYGRKEVEEVEAAKFQYLPVYHEMRRAFDKISKNHVLQISNTQRDLIGTAITYYKTDDKIQQALLEGNFSKEEINAILGMKNFSKFGNLSVKAMQKVIPYLEKGLTYDKACEQAGYDFRAHNVAEKKKYLPKLPQNTYDITSPVVKRAINQTIKVVNEIIKRHGSPAAVNIELAREMSKSFKDRKRIEKEQKDNAAQNQRIYDEIKDTFHVAQPSGQDIVKYKLWQEQDCKCVYTGQPIKAENLFVPGYYEVDHIIPYSISFDDSYTNKVLVLTKANRDKGNRIPMQYVADKEEYEIRVNTLIKNRAKREKLLKPILTEEDMGEMKQRSLQDTQFITRFMMNYIKDYLLFDEAYDRKQRVTAVNGRVTAYMRKRWGINKVREDGDLHHSVDAVVVACITPGIVQTVTEYAKREENRYLNKDDVAMRERFPMPWPEFSTELDIRTCKEPKEMLRKVSLANYQDVDIDSIKPIFVSRMTKKKVTGQAHKETIRAYREVDGKMRTVTKTSIQELKLDKDGEIEGYYNPSSDILLYELLRSRLKEAGGNGKKAFPEGFVYKPTPNGGVAPKVKKVKICAVSNLNIPVNHGVAANGDMVRIDLYYVEGEGYYFIPIYISDLMKEELPKKACVSNKEYHDWKNMKDEDFLYSIYPNDLLHIKSSTPKKFTKNIQKGKENDSFEAEEAFVYYIKAGIGTGSITVVTHDNNYTIQSLGIKTLNCIEKYHVDVLGNKYKAAVEERK

SEQ ID NO: 5808 - protein, 1080 aa, unidentified
  REGION 1..1080: note = Description of Unknown: uncultivated organism
  REGION 1..1080: note = MG49-4 effector
MGYMLGLDCGIASVGHAVMLLDKNDEPFKIHSLGSRVFEAAEQLKTGASLALPRRMNRGLRRTTRRKQFRKERIKNLICSYMNVDLQYINDLYNVRGLTDIYEIRCKALDKPLDKGEFIRLLIHLSQRRGFRSNRKADSNDSKSDSGKLLKAVTENQELMQEKNYRTIGEMLYKDEKFLHKKRNDASGYSNTFSRSDYESEIKYIFNQQRTFRNIYATKEFEEKYLEIYLSQRMFDDGPGGGSPYRGNQIEKMVGKCTLEKDEPRAPKASFSFEYFNLLCKVNALKIATPSEKRFLTEIEKKCVIKLAFDKNNITYYHIRKALNLAENELFNISYKNDDYESTEKKTKFTYLSIYHQLKKAFGAAFAEWTISKKNDMASALTVNKYDAKISKCLKEKGFSETEIKIALTVPTFKKFGNLSIKALNKIIPFLEKGMIYSDAVQAAGYVPDSSENKLNKFLPAKAPELDDIVNPVVRRAVSQTIKIVNAVIREMGESPSYINIELARELSKNFKDRNEIKKEYNENYKFNEYIKERLVNEFHIISPGGQDIVKLKLWEQQDGICPYSGTKIEITRLFESGYAEIDHIIPYSKSFDDTYNNKILVKSAENRNKGNKLPLQYLYGVKAGKFRVWVENSNLSFRKKQNLLKEKISEDDKAFKDRNLQDTQYLSRFLLNYIKNYLEFSPNNKGRKNVVTSVNGKITSYVRKRWEIPKVRADGDMHHAVDAAVIACITPGMIQKITNYSKFTENENTVKINGKIKNADSETGEVFDRFPLPYPYFTKELIMRCSNNPTRILREKPFPNYCNDEVVNPIFVSRMPKRKVTGAAHEDTARKLVVENEISYLISKTDLKKLKLKNGEIDKYYNPEDDTLLYNALKQRLIEFNGDASKAFEEPFNKPKSDGTKGPLVKKVKLIERATSVVPIQGGTAYAKNDSIVRTDVFYIDGEGYYLVPIYVTDTIKSELPNKAIVAHKPYEQWKEMNDNDFLFSLYKNDLIKVISKKDMTFSLKNKESKLASTYSTKEEFVYFKSVNISSGAFTVINHDNSYSICSLGAKTLLSIEKYQVDFLGNKFKVNKERRQRFK

SEQ ID NO: 5809 - protein, 912 aa, unidentified
  REGION 1..912: note = Description of Unknown: uncultivated organism
  REGION 1..912: note = MG49-5 effector
MKEKGYRTVGEMLWKDERFAENKRNKGGDYSNTFLRSQLKEEIGIIFEKQKAFGSLYVTDAFSEKYLEILFSQRAFEEGPGEESPYAGNQIEKMVGKCTFEKEEKRAPKATYTFELYNLWQKINSIGILQDGVKRRLTDDERNKLFALCHKTEKIDYKRIRKELELGQDALFSNLTYGQKEVEEVEAAKFQYLPVYHEMRKAFDKISKNHVLQISNTQRDLIGTAITYYKTDDKIQQALLEGNFSKEEINAILGMKNFSKFGSLSVKAMQKVIPYLEKGLTYDKACEQAGYDFRAHNVAEKKKYLPKLPQNTYDITSPVVKRAINQTIKVVNEIIKRHGSPAAVNIELAREMSKSFKDRKRIEKEQKDNAAQNQRIYDEIKDTFHVAQPSGQDIVKYKLWQEQDCKCVYTGQPIKAENLFVPGYYEVDHIIPYSISFDDSYTNKVLVLTKANRDKGNRIPMQYVADKEEYEIRVNTLIKNRAKREKLLKPILTEEDMGEMKQRSLQDTQFITRFMMNYIKDYLLFDEAYDRKQRVTAVNGRVTAYMRKRWGINKVREDGDLHHSVDAVVVACITPGIVQMVTEYAKREENRYLNKDDVAMRERFPMPWPEFSTELDIRTCKEPKEMLQKVSLANYQDVDIDSIKPIFVSRMTKKKVTGQAHKETIRAYREVDGKMRTVTKTSIQKLELDKDGEIERYYNPSSDILLYELLRSRLKEAGGNGKEAFPEGFVYKPTPNGGVAPKVKKVKICAVSNLNIPVNHGVAANGDMVRIDLYYVEGEGYYFIPIYISDLMKEELPKKACVSNKEYHDWKNMKDEDFLYSIYPNDLLHIKSSTPKKFTKNIQKGKENDSFEAEEAFVYYIKAGIGTGSITVVTHDNNYTIQSLGIKTLNCIEKYHVDVLGNKYKAAVEERK

SEQ ID NO: 5810 - protein, 1087 aa, unidentified
  REGION 1..1087: note = Description of Unknown: uncultivated organism
  REGION 1..1087: note = MG49-6 effector
MKYAVGLDIGISSVGYAVMMLDETDMPSAILKMGSRIFDAAENPKDGSSLAAPRRNNRGMRRRLRRKRFKKEQIKDLIVKNGIMSYSDINEIYNSGKVLSDIYSIRAEALNRILTKEEFVRLLIHLSQRRGFKSNRKVDASDSKSEAGKLLDAVNKNKSLMEEKHYRTIGEMLFIDEKFAKNKRNKAEDYANTFARSEYVAEINTIFDAQKVFGNEYAIDELKEDYLKIYLSQRSFDEGPGGNSPYSGNQIEKMLGKCTFEKKEFRAVKASFTFEYFSLLSKVNSLKLKSSTEKRFLTKAERDAVIALSFNKKNISYASIRKELNLPNDTLFNISYGNGDKTVEEIEKKSKFTYLNAYHTFKKAFGDSYINWSTDKKNHLGYAIALYKNDNKIAEYLSEHGFDKSEIKIALSLPSIPKAGNLSLKAMNKIIPYLEEGMIYNEACKAAGYNFKADETDKRMFLPANEEDAPELGDIRNPVVRRSISQTIKVTNAIIREFGESPCFVNIELARELSKTKKERNEIEKNQLENRNHNEEIVKELKSTFGLLQPTGQDIVKYKLWKEQNGICPYSLEPILIENLFDIGYTDIDHIIPYSISFDDTYNNKVLVLSSENRQKGNRIPMQYLTGKKKDDFWLWVDNSNLRARKKKNLLKEEITDDDISGFKKRNLQDTQYISRFMLNFLKKYLNTQPNSSGKKNTIIAVNGAATAYIRKRWGINKIRENGDTHHAVDAVVIACVTDSMIKKISEYSKHKETEFVHPETKEIKDIDLRTGEIINKFPMPYNWFRDELVMRTSNNPTRILHEKPLPNYGTDQKVEPIFVSRMPNHKVKGSAHEETIRKKYEEDNKTYSVSKVSLSSLKLTNGEIENYFNPSSDMLLYNALKQRLAMFGGNGSKAFEEPFYKPKSDGSQGPLVKKVKIQSKSTLSVPVLKGTAIADNGSMVRVDVFFVEGEGYYMVPIYVSDTVKPELPNKAIIANKPYTEWKEMKEQDFLFSLYPNDLIRIKFNKEKQFSLVQKDSTLAKNLLLSEGYFYYKKASISSASITIINNDNTYTVASLGVKRIPLIEKYQVDVLGNIQKVGKEKRMRFR

SEQ ID NO: 5811 - protein, 1117 aa, unidentified
  REGION 1..1117: note = Description of Unknown: uncultivated organism
  REGION 1..1117: note = MG49-7 effector
MRYGIGLDIGIASVGSAIVLLDGNGEPNKIHRLASRIFDAAEVPKTGAPLAQERREKRGMRRRCRRKRHRKKRIRALICKSLDVDNDYIENIFAETGLSNIYQIRCEALDRALTKDESIRLLIHFSQRRGFRSNRKVDAASDNDEGALLSAVSENKKLMELKKYRTIGETLYRDDKFAEFKRNKGGDYTNTFSRADYKNEIETVFAAQREMGNSLFTEELEAGFKDIVFSQRSFDEGPGPGKDSIYSGNQIEKMLRKCTFEPDEYRAPKASFTFEYFNLQSKINALKIVSDSGKRSLTKEERDAVRDLAFSQKEITYSSVRKALKLSNQEMFNISYFLSDDKKKKTGDENPFELRDSVEKKIKFNYLKAYHIFKKAYGEEYDTWDSEKRDILAYVLTVFKTDSKIRDNLAENGFNEEEINIALTIPSFSKFGNLSCKAMRKMIPYLEEGYLYNEAAEKAGYNFKADDKCASMYLPTRAYIRPEHRKSPDQVEAPELGDITNPVVRRAVSQTIKVVNAIIREMGCSPTYVNIELARDLSKNHDERNRILKRNNDNKAQNEKIMDELRKEFKFGNPRKSDLLKLKLWTEQHGRCMYSGEPIIRERLFEDNYAEIDHIVPYSISFDDSMANKVLVLAKENRDKGNRLPLEYLKGKDADDFRIRITTSTLKYRKKQNLLKEKITKDDEEGFKQRNLVDTQYISRFMTKFIKKYLKFEGEPKVVSVAGGVTSYIRKRWGIKKIREDGDTHHAIDACVIACTTQGMVQRIALYSKYRETEYMDENGNYFDVDRKTGEVINRFPMPYPTFRKELEMLSSNDPRRILSEKPLPNYDGSEQLKPIFVSRMPKRKATGKVHEDTVRTLYRHNGVEYSIQKVALEELKLDKKTNKIVSDTSEYYNPDSDRLLYSALKRRLEEFDGDGKKAFTEPFHKPKSDGSDGPIVKKVKMIKRITSYVLLNGENIGKKEIAENGKRVRTDVFYVEGEGYYFVPIYVDDTLKKDLPDRAIVQRKPMKEWKQMDDKNFIFSLYPDDLVKIVFPNNKTFKIKKELAKAGSTLPKEIVLKEGLFYYQGVNISSGNITVESNDGTYYSEPGPRKLISLEKYEVDVLGNIHKVNKEKRMGF

SEQ ID NO: 5812 - protein, 1117 aa, unidentified
  REGION 1..1117: note = Description of Unknown: uncultivated organism
  REGION 1..1117: note = MG49-8 effector
MRYGIGLDIGIASVGSAIVLLDGNGEPNKIHRLASRIFDAAEVPKTGAPLAQERREKRGMRRRCRRKRHRKKRIRALICKSLDVDNDYIENIFAETGLSNIYQIRCEALDRALTKDESIRLLIHFSQRRGFRSNRKVDAASDNDEGALLSAVSENKKLMELKKYRTIGETLYRDDKFAEFKRNKGGNYTNTFSRADYKNEIETVFAAQREMGNSLFTEELEAGFKYIVFSQRSFDEGPGPGKDSIYSGNQIEKMLRKCTFEPDEYRAPKASFTFEYFNLQSKINALKIVSDSGKRSLTKEERDAVRDLAFSQKEITYSSVRKALKLSNLEMFNISYILSDDKKKKTGDENPFELRDSVEKKIKFNYLKAYHIFKKAYGEEYDTWDSEKRDILAYVLTVFKTDSKIRDNLAENGFNEEEINIALTIPSFSQFGNLSCKAMRKMIPYLEEGYLYNEAAEKAGYNFKADDKCASMYLPTRAYIRPEHRKSPDQVEAPELGDITNPVVRRAVSQTIKVVNAIIREMGCSPTYVNIELARDLSKNHDERNRILKRNNDNKAQNERIMDELRKEFKFGNPRKSDLLKLKLWTEQHGRCMYSGEPIIRERLFEDNYAEIDHIVPYSISFDDSMANKVLVLAKENRDKGNRLPLEYLKGKDADDFRIRITTSTLKYRKKQNLLKEKITKDDEEGFKQRNLVDTQYISRFMTKFIKKYLKFEGEPKVVSVAGGVTSYIRKRWGIKKIREDGDTHHAIDACVIACTTQGMVQRIALYSKYRETEYMDENGNYFDVDRKTGEVINRFPMPYPTFRKELEMLSSNDPRRILSEKPLPNYDGSEQLKPIFVSRMPKRKATGKVHEDTVRTLYRHNGVEYSIQKVALEELKLDKKTNKIVSDTSEYYNPDSDRLLYSALKRRLEEFDGDGKKAFTEPFHKPKSDGSDGPIVKKVKMIKRITSYVLLNGENIGKKEIAENGKRVRTDVFYVEGEGYYFVPIYVDDTLKKDLPDRAIVQRKPMKEWKQMDDKNFIFSLYPDDLVKIVFPNNKTFKIKKELAKAGSTLPKEIVLKEGLFYYQGVNISSGNITVESNDGTYYSEPGPRKLISLEKYEVDVLGNIHKVNKEKRMGF

SEQ ID NO: 5813 - protein, 1120 aa, unidentified
  REGION 1..1120: note = Description of Unknown: uncultivated organism
  REGION 1..1120: note = MG49-9 effector
MRYGIGLDIGISSVGSCIIQLDEKNEPYKILKLYSRVYYKAEKSDGKSLATERRNNRSIRRVIRRKRHRKERIRTLICNRMNVDNSYIDRIFAFDKLTDIYMIRCEALDRLLDINEFIRLLIHFSQRRGFKSNRKAEAKNAEKESEDGVMLSAVKENHELMKEKGYRTIGEMIFRDQKFSGSIRNKGGSYSHTFLRSDYENEIHLIFRMQRAFLNQYADEEFENKYMEILMSQRSFDEGPGGGKYAGNQIEKMLRKCTFEPNEYRAPKASFSFQYFTLLSKINSIRIQTNSGRRYLSENERISIKKLAFDQKEINYSSLRKLLKLSDEETFNISYFLKTSSEKTSSKKKVPDVLTDFVKMRDKVETKTKFNFLKEYHVFKSVYGNEYDFWENDKKNKLAYVLTVYKTDEKIKAQLEALGFTEEEIAKAMTIQSFAKFGNLSCKAMDKMIPYLEEGYLYNEAADKAGYNFKADEKCASMYLPTRSYILPEHRKSVDQVCAPELDNIVNPVVRRAVSQTIKVVNAIIREMKDSPVYVNVEMARELSKSYNERLKIEKEQQKNKSRNDSVIDKLRSDFQIVSPTGQDIMKLKLWEDQQGLCMYSGRKIPVNRLFESGFTEVDHIVPYSISFDDSYNNKVLVLATENQNKSDRLPLQYLRDNKADEFRVRVETSSLNIRKKQNLLKEKITDEDYTGFKERNLKDTQYISRFMKNYIEKYLLFAEKPKVTAVNGAITSYIRKRWGIRKIRSDGDTHHAIDACVIACVTQGMIQKISVYSKYKEKGKKSQQFIEYTNTTGTLYDVDSSTGEIVDRFPMPYPTFRKELEMLTSKDPMKVLCESNLPNYTGNEQLTPIFVSRMVKHKVTGAAHKDTKQSLKKKDGKSFAVQKVDLANLKFDKKTGEIINYYNPQDDALLYAALIRRLKEFDGNAKKAFEEPFFKPKKDGSQGPLVKKVKIIEKSTLSVPLDNGNAIAGNDSMVRVDVFYINGEGYYLVPVYEVDTVKKILPNKAIVPNKSYEEWKIMSDENFVFSLYPNDLIAIKSNKKMTFSLDNKNSTLPEKYVSTFELVYYRNTGISTASINVINHDKTYVKKSLGVKNLMKIEKYSVDVLGNITKVGREKRRGF

SEQ ID NO: 5814 - protein, 1094 aa, unidentified
  REGION 1..1094: note = Description of Unknown: uncultivated organism
  REGION 1..1094: note = MG49-10 effector
MYRLGLDIGTTSVGAAILNIDHYGEPNRIIDMHVRTFEAAENPNDGSSLAAPRREARGARRRNRRHKHRLDRIKALIQSEGIYTKEKLDSLYHAKGNILMDIYQIRYESLERKLNNEELTRLLIHFAQRRGFKSNRKNEKKGSDEGKLLAATADNEKYLKEKGYRTVGEMLWKDERFAENKRNKGGDYSNTFLRSQLKEEIGIIFEKQKAFGSLYVTDAFSEKYLEILFSQRAFEEGPGEESPYAGNQIEIMVGKCTFEKEEKRASKATYTFELFNLWQKMNSIGILQDGIKRRLTDDERNKLFALCHKTEKVDYKRIRKELEMGQDALFSNLTYGRKEVEEVEAAKFQYLPVYHEMRKAFDKISKNHILQISNTQRDLIGTAITYYKTDDKIQQALLEGNFSKEEINAILGMKNFSKFGSLSVKAMQKVIPYLEKGLTYDKACEQAGYDFRAHNVAEKKKYLPKLPQNTYDITSPVVKRAINQTIKVVNEIIKRHGSPAAVNIELAREMSKSFKDRKRIEKEQKDNAAQNQRIYDEIKDTFHVAQPSGQDIVKYKLWQEQDCKCVYTGQPIKAENLFVPGYYEVDHIIPYSISFDDSYTNKVLVLTKANRDKGNRIPMQYVADKEEYEIRVNTLIKNRAKREKLLKPILTEEDMGEMKQRSLQDTQFITRFMMNYIRDYLLFDEAYDRKQRVTAVNGRVTAYMRKRWGINKVREDGDLHHSVDAVVVACITPGIVQMVTEYAKREENRYLNKDDVAMRERFPMPWPEFSTELDIRTCKEPKEMLRKVSLANYQDVDIDSIKPIFVSRMTKKKVTGQAHKETIRAYREVDGKMRTVTKTSIQELKLDKDGEIEGYYNPSSDILLYELLRSRLKEAGGNGKKAFPEGFVYKPTPNGGVAPKVKKVKICAVSNLNIPVNHGVAANGDMVRIDLYYVEGEGYYFIPIYISDLMKEELPKKACVSNKEYHDWKNMKDEDFLYSIYPNDLLHIKSSTPKKFTKNIQKGKENDSFEAEEAFVYYIKAGIGTGSITVVTHDNNYTIKSLGIKTLNCIEKYHVDVLGNKYKAAVGRGNNGRCQRVGEQVRTRFLYHHLLKSI

SEQ ID NO: 5815 - protein, 1070 aa, unidentified
  REGION 1..1070: note = Description of Unknown: uncultivated organism
  REGION 1..1070: note = MG49-11 effector
MYRLGLDIGTTSVGAAILNIDHYGEPNRIIDMHVRTFEAAENPNDGSSLAAPRREARGARRRNRRHKHRLDRIKALIQSEGIYTKEKLDSLYHAKGNILMDIYQIRYESLERKLNNEELTRLLIHFAQRRGFKSNRKNEKKGSDEGKLLAATADNEKYLKEKGYRTVGEMLWKDERFAENKRNKGGDYSNTFLRSQLKEEIGIIFEKQKAFGSLYVTDAFSEKYLEILFSQRAFEEGPGEESPYAGNQIEKMVGKCTFEKEEKRASKATYTFELFNLWQKINSIGILQDGVKRRLTDDERNKLFALCHKTEKIDYKRIRKELEMGQDALFSNLTYGRKEVEEVEAAKFQHLPVYHEMRKAFDKISKNHVLQISNTQRDLIGTAITYYKTDDKIQQALLEGNFSKEETNAILGMKNFSKFGNLSVKAMQKVIPYLEKGLTYDKACEQAGYDFRAHNVAEKKKYLPKLPQNTYDITSPVVKRAINQTIKVVNEIIKRHGSPAAVNIELAREMSKAFRDRKRIEKEQKDNAAQNQRIYDEIKDTFHVAQPSGQDIVKYKLWQEQDCKCVYTGQPIKAENLFVPGYYEVDHIIPYSISFDDSYTNKVLVLTKANRDKGNRIPMQYVADKEEYEIRVNTLIKNRAKREKLLKPILTEEDMGEMKQRSLQDTQFITRFMMNYIRDYLLFDEAYDRKQRVTAVNGRVTAYMRKRWGINKVREDGDLHHSVDAVVVACITPGIVQMVTEYAKREENRYLNKDDVAMRERFPMPWPEFSTELDIRTCKEPKEMLRKVSLANYQDVDIDSIKPIFVSRMTKKKVTGQAHKETIRAYREVDGKMRTVTKTSIQELKLDKDGEIEGYYNPSSDILLYELLRSRLKEAGGNGKKAFPEGFVYKPTPNGGVAPKVKKVKICAVSNLNIPVNHGVAANGDMVRIDLYYVEGEGYYFIPIYISDLMKEELPKKACVSNKEYHDWKNMKDEDFLYSIYPNDLLHIKSSTPKKFTKNIQKGKENDSFEAEEAFVYYIKAGIGTGSITVVTHDNNYTIKSLGIKTLNCIEKYHVDVLGNKYKAAVEERK

SEQ ID NO: 5816 - protein, 1070 aa, unidentified
  REGION 1..1070: note = Description of Unknown: uncultivated organism
  REGION 1..1070: note = MG49-12 effector
MYRLGLDIGTTSVGAAILNIDHYGEPNRIIDMHVRTFEAAENPNDGSSLAAPRREARGARRRNRRHKHRLDRIKALIQSEGIYTKEKLDSLYHAKGNILMDIYQIRYESLERKLNNEELTRLLIHFAQRRGFKSNRKNEKKGSDEGKLLAATADNEKYLKEKGYRTVGEMLWKDERFAENKRNKGGDYSNTFLRSQLREEIGIIFEKQKAFGSLYVTDAFSEKYLEILFSQRAFEEGPGEESPYAGNQIEKMVGKCTFEKEEKRASKATYTFELFNLWQKINSIGILQDGVKRRLTDDERNKLFALCHKTEKIDYKRIRKELELGQDALFSNLTYGQKEVEEVEAAKFQYLPVYHEMRKAFDKISKNHVLQISNTQRDLIGTAITYYKTDDKIQQALLEGKFSKEEINAILGMKNFSKFGSLSVKAMQKVIPYLEKGLTYDKACEQAGYDFRAHNVAEKKKYLPKLPQNTYDITSPVVKRAINQTIKVVNEIIKRHGSPAAVNIELAREMSKSFKDRKRIEKEQNDNAAQNQRIYDEIKDTFHVAQPSGQDIVKYKLWQEQDCKCVYTGQPIKAENLFVPGYYEVDHIIPYSISFDDSYTNKVLVLTKANRDKGNRIPMQYVADKEEYEIRVNTLIKNRAKREKLLKPILTEEDMGEMKQRSLQDTQFITRFMMNYIRDYLLFDEAYDRKQRVTAVNGRVTAYMRKRWGINKVREDGDLHHSVDAVVVACITPGIVQTVTEYAKREENRYLNKDDVAMRERFPMPWPEFSTELDIRTCKEPKEMLRKVSLANYQDVDIDSIKPIFVSRMTKKKVTGQAHKETIRAYREVDGKMRTVTKTSIQELKLDKDGEIEGYYNPSSDILLYELLRSRLKEAGGNGKKAFPEGFVYKPTPNGGVAPKVKKVKICAVSNLNIPVNHGVAANGDMVRIDLYYVEGEGYYFIPIYISDLMKEELPKKACVSNKEYHDWKNMKDEDFLYSIYPNDLLHIKSSTPKKFTKNIQKGKENDSFEAEEAFVYYIKAGIGTGSITVVTHDNNYTIKSLGIKTLNCIEKYHVDVLGNKYKAAVEERK

SEQ ID NO: 5817 - protein, 1070 aa, unidentified
  REGION 1..1070: note = Description of Unknown: uncultivated organism
  REGION 1..1070: note = MG49-13 effector
MYRLGLDIGTTSVGAAILNIDHYGEPNRIIDMHVRTFEAAENPNDGSSLAAPRREARGARRRNRRHKHRLDRIKALIQSEGIYTKEKLDSLYHAKGNILMDIYQIRYESLERKLNNEELTRLLIHFAQRRGFKSNRKNEKKGSDEGKLLAATADNEKYLKEKGYRTVGEMLWKDERFAGNKRNKGGDYSNTFLRSQLKEEIGIIFEKQKAFGSLYVTDAFSEKYLEILFSQRAFEEGPGEESPYAGNQIEKMVGKCTFEKEEKRAPKATYTFELYNLWQKINSIGILQDGVKRRLTDDERNKLFALCHKTEKIDYKRIRKELELGQDALFSNLTYGQKEVEEVEAAKFQYLPVYHEMRKAFDKISKNHVLQISNTQRDLIGTAITYYKTDDKIQQALLEGNFSKEEINAILGMKNFSKFGSLSVKAMQKVIPYLEKGLTYDKACEQAGYDFRAHSVAEKKKYLPKLPQNTYDITSPVVKRAINQTIKVVNEIIKRHGSPAAVNIELAREMSKSFKDRKRIEKEQKDNAAQNQRIYDEIKDTFHVAQPSGQDIVKYKLWQEQDCKCVYTGQPIKAENLFVPGYYEVDHIIPYSISFDDSYTNKVLVLTKANRDKGNRIPMQYVADKEEYEIRVNTLIKNRAKREKLLKPILTEEDMGEMKQRSLQDTQFITRFMMNYIKDYLLFDEAYDRKQRVTAVNGRVTAYMRKRWGINKVREDGDLHHSVDAVVVACITPGIVQMVTEYAKREENRYLNKDDVAMRERFPMPGPEFSTELDIRTCKEPKEMLRKGSLANYQDVDIDSIKPIFVSRMTKKKVTGQAHKETIRAYREVDGKMRTVTKTSIQELKLDKDGEIEGYYNPSSDILLYELLRSRLKEAGGNGKKAFPEGFVYKPTPNGGVAPKVKKVKICAVSNLNIPVNHGVAANGDMVRIDLYYVEGEGYYFIPIYISDLMKEELPKKACVSNKEYHDWKNMKDEDFLYSIYPNDLLRIKSSTPKKFTKNIQKGKENDSFEAEEAFVYYIKAGIGTGSITVVTHDNNYTIQSLGIKTLNCIEKYHVDVLGNKYKAAVEERK

SEQ ID NO: 5818 - protein, 1070 aa, unidentified
  REGION 1..1070: note = Description of Unknown: uncultivated organism
  REGION 1..1070: note = MG49-14 effector
MYRLGLDIGTTSVGAAILNIDHYGEPNRIIDMHVRTFEAAENPNDGSSLAAPRREARGARRRNRRHKHRLDRIKALIQSEGIYTKEKLDSLYHAKGNILMDIYQIRYESLERKLNNEELTRLLIHFAQRRGFKSNRKNEKKGSDEGKLLAATADNEKYLKEKGYRTVGEMLWKDERFAGNKRNKGGDYSNTFLRSQLREEIGIIFEKQKAFGSLYVTDAFSEKYLEILFSQRAFEEGPGEESPYAGNQIEKMVGKCTFEKEEKRASKATYTFELFNLWQKINSIGILQDGVKRRLTDDERNKLFALCHKTEKIDYKRIRKELELGQDALFSNLTYGQKEVEEVEAAKFQYLPVYHEMRKAFNKISKNHVLQISNTQRDLIGTAITYYKTDDKIQQALLEGNFSKEEINAILGMKNFSKFGSLSIKAMQKVIPYLEKGLTYDKACEQAGYDFRAHSVAEKKKYLPKLPGDTYDITSPVVKRAINQTIKVVNEIIKRHGSPAAVNIELAREMSKSFKDRKRIEKEQNDNAAQNQRIYDEIKDTFHVAQPSGQDIVKYKLWQEQDCKCVYTGQPIKAENLFVPGYYEVDHIIPYSISFDDSYTNKVLVLTKANRDKGNRIPMQYVANKEEYEIRVNTLIKNRAKREKLLKPILTEEDMGEMKQRSLQDTQFITRFMMNYIRDYLLFDEAYDRKQRVTAVNGRVTAYMRKRWGINKVREDGDLHHSVDAVVVACITPGIVQMVTEYAKREENRYLNKDDVAMRERFPMPWPEFSTELDIRTCKEPKEMLRKVSLANYQDVDIDSIKPIFVSRMTKKKVTGQAHKETIRAYREVDGKMRTVTKTSIQELKLDKDGEIEGYYNPSSDILLYELLRSRLKEAGGNGKKAFPEGFVYKPTPNGGVAPKVKKVKICAVSNLNIPVNHGVAANGDMVRIDLYYVEGEGYYFIPIYISDLMKEELPKKACVSNKEYHDWKNMKDEDFLYSIYPNDLLHIKSSTPKKFTKNIQKGKENDSFEAEEAFVYYIKAGIGTGSITVVTHDNNYTIKSLGIKTLNCIEKYHVDVLGNKYKAAVEERK

SEQ ID NO: 5819 - protein, 1070 aa, unidentified
  REGION 1..1070: note = Description of Unknown: uncultivated organism
  REGION 1..1070: note = MG49-15 effector
MYRLGLDIGTTSVGAAILNIDHYGEPNRIIDMHVRTFEAAENPNDGSSLAAPRREARGARRRNRRHKHRLDRIKALIQSEGIYTKEKLDSLYHAKGNILMDIYQIRYESLERKLNNEELTRLLIHFAQRRGFKSNRKNEKKGSDEGKLLAATADNKKYLKEKGYRTVGEMLWKDERFAENKRNKGGDYSNTFLRSQLREEIGIIFEKQKAFCSLYVTDAFSEKYLEILFSQRAFEEGPGEESPYAGNQIEKMVGKCTFEKEEKRASKATYTFELFNLWQKINSIGILQDGMKRRLTDDERNKLFALCHKAEKVDYKRIRKELELGQDALFSNLTYGRKEVEEVEAAKFQYLPVYHEMRRAFDKISKNHVLQISNTQRDLIGTAITYYKTDDKIQQALLEGNFSKEEINAILGMKNFSKFGNLSVKAMQKVIPYLEKGLTYDKACEQAGYDFRAHNVAEKKKYLPKLPQNTYDITSPVVKRAINQTIKVVNEIIKRHGSPAAVNIELAREMSKSFRDRKRIEKEQNDNAAQNQRIYDEIKDTFHVAQPSGQDIVKYKLWQEQDCKCVYTGQPIKAENLFVPGYYEVDHIIPYSISFDDSYTNKVLVLTKANRDKGNRIPMQYVANKEEYEIRVNTLIKNRAKREKLLKPILTEEDMGEMKQRSLQDTQFITRFMMNYIKDYLLFDEAYDRKQRVTAVNGRVTAYMRKRWGINKVREDGDLHHSVDAVVVACITPGIVQTVTEYAKREENRYLNKDDVAMRERFPMPWPEFSTELDIRTCKEPKEMLRKVSLANYQDVDIDSIKPIFVSRMTKKKVTGQAHKETIRAYREVDGKMRTVTKTSIQELKLDKDGEIEGYYNPSSDILLYELLRSRLKEAGGNGKKAFPEGFVYKPTPNGGVAPKVKKVKICAVSNLNVSVNHGVAANGDMVRIDLYYVEGEGYYFIPIYISDLMKEELPKKACVSNKEYHDWKNMKDEDFLYSIYPNDLLHIKSSTPKKFTKNIQKGKENDSFEAEEAFVYYIKAGIGTGSITVVTHDNNYTIKSLGIKTLNFIEKYHVDVLGNKYKAAVEERK

SEQ ID NO: 5820 - protein, 1068 aa, unidentified
  REGION 1..1068: note = Description of Unknown: uncultivated organism
  REGION 1..1068: note = MG49-16 effector
MYRLGLDIGTTSVGAAILNIDHYGEPNRIIDMHVRTFEAAENTKDGSSLAAPRREARGARRRNRRHKHRLDRIKALIQSEGIYTKEKLDSLYHAKGNILMDIYQIRYESLERKLNNEELTRLLIHFAQRRGFKSNRKNEKKGSDEGKLLAATAENEKYLKEKGYRTVGEMLWKDERFAGNKRNKGGDYSNTFLRSQLKEEIGIIFERQKAFGSLYVTDAFSEKYLEILFSQRAFEEGPGEESPYAGNQIEKMVGKCTFEKEEKRASKATYTFELFNLWQKMNSIGILQDGIKRRLTDDERNKLFALCHKMEKVDYKRIRKELEMGQDALFSNLTYGRKEVEEVEAAKFQYLPVYHEMRKAFDKISKNHILQISNTQRDLIGTAITYYKTDDKIQQALLEGNFSKEEINAILGMKNFSKFGSLSVKAMQKVIPYLEKGLTYDKACEQAGYDFRAHSVAEKKKYLPKLPQNTYDITSPVVKRAINQTIKVVNEIIKRHGSPSAVNIELAREMSKSFKDRKRIEKEQKDNAAQNQRIYDEIKDTFHVAQPSGQDIVKYKLWQEQDCKCVYTGQPIKAENLFVPGYYEVDHIIPYSISFDDSYTNKVLVLTKANRDKGNRIPMQYVADKEEYEIRVNTLIKNRAKREKLLKPILTEEDMGEMKQRSLQDTQFITRFMMNYIKDYLLFDEAYDRKQRVTAVNGRVTAYMRKRWGINKVREDGDLHHSVDAVVVACITPGIVQMVTEYAKREENRYLNKDDVAMRERFPMPWPEFSTELDIRTCKEPKEMLQKVSLANYQDVDIDSIKPIFVSRMTKKKVTGQAHKETIRAYREVDGKMRTVTKTSIQKLGLDKDGEIERYYNPSSDILLYELLRSRLKEAGGNGKEAFPEGFVYKPTPNGGVAPKVKKVKIYDVSNLNIPVNHGVAANGKMVRIDLYYVEGEGYYFIPIYISDLMKEELPKKACVPHKEYHDWKNMKDEDFLYSIYPNDLLYIKSSTPKKFAKKRGEKKDFFEAEEAFVYYREAGISGATITVETHDNNYTIQSLGVKTLSRIEKYYVDVLGNKYKAAVEERK

SEQ ID NO: 5821 - protein, 833 aa, unidentified
  REGION 1..833: note = Description of Unknown: uncultivated organism
  REGION 1..833: note = MG49-17 effector
TFEYFNLQSKINALKIVSDSGKRSLTKEERDAVRDLAFSQKEITYSSVRKALKLSNQEMFNISYILSDDKKKKTGDENPFELRDSVEKKIKFNYMKAYHIFKKAYGEEYDTWDSEKRDILAYVLTVFKTDSKIRDNLAENGFNEEEINIALTIPSFSKFGNLSCKAMRKMIPYLEEGYLYNEAAEKAGYNFKADDKCASMYLPTRAYIRPEHRKSPDQVEAPELGDITNPVVRRAVSQTIKVVNAIIREMGCSPTYVNIELARDLSKNHDERNRILKRNNDNKAQNERIMDELRKEFKFGNPRKSDLLKLKLWTEQQGRCMYSGEPIIRERLFEDNYAEIDHIVPYSISFDDSMANKVLVLAKENRDKGNRLPLEYLKGKDADDFRIRITTSTLKYRKKQNLLKEKLTKDDEEGFKQRNLVDTQYISRFMTKFIKKYLKFEGEPKVVSVAGGVTSYIRKRWGIKKIREDGDTHHAIDACVIACTTQGMVQRIALYSKYRETEYMDENGNYFDVDRKTGEVINRFPMPYPTFRKELEMLSSNDPRRILSEKPLPNYDGSEQLKPIFVSRMTNRKVTGQAHEETLRKPVIENGQNYVVQKVPLTSLKLDKNGEIENYYMPQSDRLLYEALKARLAEFGGKGEKAFTEPFYKPKSDGTQGPLVKKVKTIEKRSISVPLADGTAAADNGSMVRVDVFYVEGEGYYLVPIYVADTVKKELPNRAITRDRSYIDWKVMDDKKFIFSLYPNDLIKVTSKKDMKFSLVRNESTLPKEHTTKAEYVYYKKTSISTGSITVINHDKTYLINSLGVKTLLSIEKYEVDVLGNIHKVNKEKRMGF

SEQ ID NO: 5822 - protein, 902 aa, unidentified
  REGION 1..902: note = Description of Unknown: uncultivated organism
  REGION 1..902: note = MG49-18 effector
VGEMLWKDERFAENKRNKGGDYSNTFLRSQLKEEIGIIFEKQKAFGSLYVTDAFSEKYLEILFSQRAFEEGPGEESPYAGNQIEKMVGKCTFEKEEKRAPKATYTFELYNLWQKINSIGILQDGVKRRLTDDERNKLFALCHKTEKIDYKRIRKELELGQDALFSNLTYGQKEVEEVEAAKFQYLPVYHEMRKAFNKISKNHVLQISNTQRDLIGTAITYYKTDDKIQQALLEGNFSKEEINAILGMKNFSKFGSLSIKAMQKVIPYLEKGLTYDKACEQAGYDFRAHSVAEKKKYLPKLPGDTYDITSPVVKRAINQTIKVVNEIIKRHGSPAAVNIELAREMSKSFKDRKRIEKEQNDNAAQNQRIYDEIKDTFHVAQPSGQDIVKYKLWQEQDCKCVYTGQPIKAENLFVPGYYEVDHIIPYSISFDDSYTNKVLVLTKANRDKGNRIPMQYVANKEEYEIRVNTLIKNRAKREKLLKPILTEEDMGEMKQRSLQDTQFITRFMMNYIRDYLLFDEAYDRKQRVTAVNGRVTAYMRKRWGINKVREDGDLHHSVDAVVVACITPGIVQMVTEYAKREENRYLNKDDVAMRERFPMPWPEFSTELDIRTCKEPKEMLQKVSLANYQDVDIDSIKPIFVSRMTKKKVTGQAHKETIRAYREVDGKMRTVTKTSIQKLELDKDGEIERYYNPSSDILLYELLRSRLKEAGGNGKEAFPEGFVYKPTPNGGVAPKVKKVKIYAVSNLNIPVNHGVAANGAMVRIDLYYVEGEGYYFIPIYISDLMKEELPKKACVPHKEYHDWKNMKDEDFLYSIYPNDLLYIKSSTPKKFAKKRGEKKDSFEAEEAFVYYREAGISGATITVETHDNNYTIQSLGVKTLSRIEKYHVDVLGNKYKAAVEERK

SEQ ID NO: 5823 - protein, 902 aa, unidentified
  REGION 1..902: note = Description of Unknown: uncultivated organism
  REGION 1..902: note = MG49-19 effector
VGEMLWKDERFAGNKRNKGGDYSNTFLRSQLKEEIGIIFEKQKAFGSLYVTDAFSEKYLEILFSQRAFEEGPGEESPYAGNQIEKMVGKCTFEKEEKRASKATYTFELFNLWQKINSIGILQDGMKRRLTDDERNKLFALCHKAEKVDYKRIRKELELGQDALFSNLTYGRKEVEEVEAAKFQYLPVYHEMRRAFDKISKNHVLQISNTQRDLIGTAITYYKTDDKIQQALLEGKFSKEEINAILGMKNFSKFGSLSVKAMQKVIPYLEKGLTYDKACEQAGYDFRAHSVAEKKKYLPKLPEDTYDITSPVVKRAINQTIKVVNEIIKRHGSPAAVNIELAREMSKSFKDRKRIEKEQKDNAAQNQRIYDEIKDTFHVVQPSGQDIVKYKLWQEQDCKCVYTGQPIKAENLFVPGYYEVDHIIPYSISFDDSYTNKVLVLTKANRDKGNRIPMQYVADKEEYEIRVNTLIKNRAKREKLLKPILTEEDMGEMKQRSLQDTQFITRFMMNYIKDYLLFDEAYDRKQRVTAVNGRVTAYMRKRWGINKVREDGDLHHSVDAVVVACITPGIVQTVTEYAKREENRYLNKDDVAMRERFPMPWPEFSTELDIRTCKEPKEMLQKVSLANYQDVDIDSIKPIFVSRMTKKKVTGQAHKETIRAYREVDGKMRTVTKTSIQELKLDKDGEIEGYYNPSSDILLYELLRSRLKEAGGNGKEAFPEGFVYKPTPNGGVAPKVKKVKIYAVSNLNIPVNHGVAANGAMVRIDLYYVEGEGYYFIPIYISDLMKEELPKKACVPHKEYHDWKNMKDEDFLYSIYPNDLLYIKSSTPKKFAKKRGEKKDSFEAEEAFVYYREAKISGAAITVETHDNNYTIQSLGVKTLSRIEKYHVDVLGNKYKAAVEERK

SEQ ID NO: 5824 - protein, 1074 aa, unidentified
  REGION 1..1074: note = Description of Unknown: uncultivated organism
  REGION 1..1074: note = MG50-1 effector
MNTSDKEISRQYVLGLDIGIASTGWAVLNSDDGSTVDGIIDLGVRTFERGETAKEGESLNLARRLARGTRRRLRRRAHRMLRLKRLLLREGLIKHDQLDTSGNIKFSADPWRLRSDGLDRLLTPVEWAEVIYHIIKHRGYLSTRKADKNTSDDDTGKVLVALKYMNERLQNGGWRTIGEMAYKDDVEFGHSIRNKQGDYRHCFDRKMLMKELQLLAVKQREYGNPHTDDAFVDQITTLLMQQRPALSGKNLLKMLGKCTFEKHEYRAPRSSYSAERFVWLTKLNNLRLLNSDRTRRALTAAERRTIIDMPYERSTVKYAQVRKILDLPDDVLFVGLRYRDDKNAENEKLIELKSWHKLKKTLTDAGLKTEWQGIATRPDELDKLAYALSVFKDDKEITDYLRAEGFDDAIIDALLPVSFSKFSHLSLLALRKLMPHLEAGMRYDEACTEAGYDHSLPVNIDQSELLPPINPEDVRNPVVLRSLTQARKVINAIVREYGQPLRVHIELARDLSRPKSERNRIEREQKKWRDHKEGLVKEYVENLGTEPSGKDLLKYRLYKEQNGKCAYSLQPLMLDRLTEAGYADIDHILPYSRTFDDSLNNKVLVLGKENRNKGNKTPWEYFGSSNEPHWLLYEAWVKSNPGFKQAKRNRLLKRSLTAEDQQDFRERHLNDTRYIARYLKNFVEQYLQLSAGAQRVRVVSGSLTSFLRARYGLIKHRKESDLHHAMDAVVVAAATNSMIKRLSDYARFDELEHVKVAGFVDPETGEVLDISTLRKLEQQFPEPWPHFRQELEARLKPDPQRALQGIEGWRHRDVSWIRPVTVSRAPRRGVTGPGHAETIRSAKRLDEQISYTRVPLSRLTLPMLEKMHGRERDKPLYEALKARLAEHGGKADKAFAEPFYKPAAPGKQAPRVTAIKIETTQKSGLPIRNGVADATSMVRVDVYRKNSKYCMVPVYAWQIERDIIPRHAVNAYKRESEWELMDETAKYLYHFQFDDLIQVDTGKSKIAGYFNGFDRSTGAIHIEVHDRNLKQGKNGLFRSIGVKSAKSLQKFQIDVLGRYWPIDKEVPPWAGAAS

SEQ ID NO: 5825 - protein, 842 aa, unidentified
  REGION 1..842: note = Description of Unknown: uncultivated organism
  REGION 1..842: note = MG50-2 effector
KDESLKAAAQTAGEQIDAIAEVLTKAQTDADVEKGLATLGLTENQIGALERLRFKQYRNLSLKALRKILPGLEAKKSYTEACKNAGYEPLTRQRSKHLPPREPYLYDRPRHGKKTGYKELRYRDLTNPVVARAFNQARLVFNALIDRYDQSPAYVHVELSRDLAKSKERRDEDKRRQDENRRIRSVARENIKETYRLDTPTERQILKERLYHEQQCKCLYTLTELDSHRVVHDENYAQIDHIWPRSLTFDNSRDNLVLVHAHANQNKGNRIPYDFIMQEKGAEHWRNVEKWILSCKGMSDNKQKRLLAKELDADEFLARNLVDTRYATRLFARMIRDRLLFDGQLEDKIEDIDPSESGKSRLEKFHKTRVRTPQGALTALLRRSWLGDIKNRETSDRHHALDACIVAACTPDLIHKVNSYFANEEKIPNRFQKNADGTYRDRCSGEIISKPEARERGLFLPPPWDGFRKEFREKYDLIMVSRAVRKKRRGELHDANPFAFRKLSVPLTDLSSEILTSHSMPEGFRKKHYELLLGLARQLENHGGDAGVAFPGPYEFLDRNGNQQRIQSISLPVVSLPEAYLKQRLKRSPKNKTVPENDRVAHKVVRLIDLNLRKLDPRTLGVGYYQRNKKLIDALRERLTEFGGNAKKAFGTEQRKNKKATADDQPETRKERPFHPNDYGKPGPMVRSIRLPESCGLGVGVRGGIAKLGDSQRTEVYWTASSYFFRPRYALSDELVYGIPEVPSGSKLVFTLIKNDYLGVVLSSGEKREGYFVMYEGDGRVQIRRHDLPRIVDYVEQQSGQPTESDEDSEEEIEPISGKKKKKVILAWRDPVAKIANITKFK

SEQ ID NO: 5826 - protein, 1529 aa, unidentified
  REGION 1..1529: note = Description of Unknown: uncultivated organism
  REGION 1..1529: note = MG50-3 effector
MTSKQENLGALTFGLDIGIASVGWAVLNEKRIVDLGVRAFDAAEDPEDGTPYNQKRRSGRVARNRLHTRAWRLKRLRRLLRDAGLISSASFQNINQKSRQKGADDTSPWTLRSKALTEKLNPDDWARVIYHLVKHRGFGVLSQSELEIDPDAPENNDKKAGLTDGLKHNSALLRKHKESLKTLGNIAVQLPNLEPDSEDGKSFKLSIRNKDKSYRHAFLRDDLRNELETLFIEQERLGNPFINISLPEHKDRLKLVNIGGEKKEVPLTFKDQVFALFDMQKPPISTEQMNGLIGDCEFERGEKRAPRNSFSNERSTWLQKLNSIKIKRYGKEEFLNKEKEEWLAVINLPYEKEKVTYSDIRDALCQKTGFSRDWREASFNMLSYRPKIKADAGWINVIDGDKVTPLNKYNNFGDKAELKEAKKKLKDTLLNSTLTYGELRTLFNVPEQCKFQYAHKEQELIQKELEATHAIPFSKDDSEYILKDGITYKINLQKSNKSNKLSKKSYALLAELKKSKPDATLSNLRVIIEQAESINEPWLFEFNQTVRIEISPAKEADTRVPIEYENIQSVEDSTCIELKGWHKLRKALAQQCPDFWQSLAVAYQQPTSIEGKETASELDEVVQVLAIYQTDFERKRELVFLGIKEEVISELLKINLKDFRNLSIKALRNILPFLEEGDTFDKACGKAHYNHSQRPAQQRKTTLDPFETYQFERWRSRNDGGKARMTKEETRYKDLNNPTVARALNQARRVLNALVEKYGSPAYINVELARDLSRSKRLRDKVKKEQDSRREDNEDADKVLKEIFKDTFGINDPTGEQLLKYKLYKEQECQCAYTYPPLPKGLDLKEVIGDKNYAQIDHIWPRSKTFDNSQNNRVLVLAGANQNKGDNIPWDFFGKKDAAHWQYFQAWVNSCKGMSKEKQDRLLAKELDADEFAARNLVDTRYVTKLFARILRERLLFAGGATEDFAEIGNDESGKDKLEKFYRSRVRTPQGGAISFLRRCWGLQKVREESDLHHALDACVIAATSHSLIKQVNDFNRREEQFPYRYKKNDDGNFVDTKTGEVLTKDEALEAGVFFPKPWKHFREEVLARLSSDGRTYQTKKGERRIYDFANYEKDEISQVQPVLVSRAVKKKRNVELHDANPMALRYYPINLMDLTLDIIDEKRLPPNLPEDRYSLIQAIRNQLLSSDGDAAIAFPNGFLTKNAKGKDKIIHTIPLPLVSLPDDFLGKVKQQLSASGTNENLKDTAKKNIPLNKLSLKVLSEKELGAAFYHRNQRMIDALKSQLSKYDDNAEKAFPEPIFYPFGKDHPFIKSMRLPAPRSSGIFVRGGIANLGEALYTEIYKYEGSYWFRARYQVAKEKTFGLPVMPVGAEFICNLTKNEYIRIKHPNLVHCYREVSRYTDSLGNILINVEAIFDNGIFEGYWNNFEPSAKRPVLYLQDKKSFFLLEDGKVLDKKILILIAKPKAKQASKEQVELEYLEFTEGQPQEKPLKFDLKVGRDAVIQRGIKDAAFIEKIKVSVLGSLQKNLKE

SEQ ID NO: 5827 - protein, 1010 aa, unidentified
  REGION 1..1010: note = Description of Unknown: uncultivated organism
  REGION 1..1010: note = MG51-1 effector
METELVLGLDLGTNSAGWALIEHSVDADGLAKPTRLVDAGVRIFPEGIEAKSSESRNVARRAARGMRRQHDRRNRRRDALRHRLQRAGLLPREKTELAAVLSANPYALRARGLDEKLEPFELGRALYHLGNRRGFKSNRKTERKTNKKDKDTVQTAITDLQKKIEDAKARTLGEYLSRIDPFKERTRCRYTSRAMYEHEFDALWDAQRPNHPAILTDDLRRQIHETIFNQRPLKVQKNLVGKCELEPTRKRAPKGLWYAQQFRLLQDVSHLEVLDIKTGEIRKLNDGERKELIAELQKKQTMTFDQIRKTLGMLDGQKFNFETANHRDKLKGNSTEARLRKALAKSYDQLTAQTRDEIVRDLLYLDDADVIRSHAISRWKLNEEAAEKLAGIDLESGYLHLSERALRKLIPHLEQGLSYMEAVVAAGYERPDQRKIEVRKELTREDMPDLRNPIVTVAMNQTRRLVNAIVREHGKPARIRVEMARDLKVSLKKRSEILSENKKNRLENETTDKILEQDFGISNPSRDDRVRYRLWKEAGYACPYSGQTIPKQSLFSPDWEVDHILPLPLSGDDSYLNKVLCATAANRDKGDRTPWQAWHGEETRWDEIVHRIKVLPWPKRKRFEVKEIDTDVFIARQLNDTRYIAREARSYLETLTGKNGVQVGKGGVTAALRRRWGLNGILSDSGEKTRADHRHHAIDAVVIALTTVGVVKRMSRLSALGRRPEDAGFPPPWEHFRDDVKRRVETMLVSHQAQRGLRGPLHEETNYGILGLKDEKGNELFAVRKSLAAMTQSELERVADNNVREIVKAHLRAHGADPEARNAEKTEQWKKAMTPPNYPTLPNGNGAPVPIKKVRLHKPSGGMIRMKNRDGVEYRAVESGSNHHIVIFEHTAEGKKKGGWDGEVVSMFEAAQRIRRHEPIIRRDLGEGKKFVMSLSINEIVKVTENGESAYWRVQKIDAGNMRVTFRPQNDARKSEDKSFEKTIGVGPLKKLAPAKVTIDPVGREHPAHD

SEQ ID NO: 5828 - protein, 1016 aa, unidentified
  REGION 1..1016: note = Description of Unknown: uncultivated organism
  REGION 1..1016: note = MG51-2 effector
MANVIGLDLGTNSIGWSILETSDERGNHFTGIVASGVRIFQEGVDRTTTGAELSKNAARRTARGTRKLHKRRNQRREALKRLLVENRMLPSGETEWHELMQKNPYELRALGVEKKISLFELGRALYHINQRRGFKSNRKTGESDGKVASALVELEEKIQDSGFKTLGQYLNLLNTREQRIRGRYTKRSMYEQEFDYLWKQQAGHHRDELNDDLKNSIYYAIFYQRPLKNQKNLVGLCEFEKRQVVNAQGEKVWTGKKRSPKGTWYAQQFRLLQEINNLKVIDGTDEWQLADDLDLRDKLVAAMQKKKTMAYAAIRKLLFGKSDQPWEHIRFNLEEGGRDKLKGNDTEASLRAVLKKKYDSLSVEQRDSLIHDLLFIEDEDVLLRHYRGLGDSLGLTNEQVEKLSKIKLQDGYLHVSEKAIKKMLPHLEQGLKYSDAVEAAGYLRKDQQDESIIPQLGEPPQLRNPIVQKALYEVRKVVNAIVREYGKPDFIRVEMGRDLKQSAAQRRESSIQNARNRKRNEEIRNHLQKEYGIANPSRDDVIKFRLWEECHHQCPYTGQTISAEMLFSPEVEIEHILPYSRTLDDSYTNKTLCMSSENANKNNRTPYEAYHADEERYQIILARVRKFAPPFGYRKWNKFRQKEIDLDTFIERQLNDTRYISREVCKYLEPLVGKYHVQSGRGQMTATLRRLWGLNHILHESGEKTREDHRHHAVDAVVTALSTPKALKAVSAASKYGRLDKLSQEQFPMPWDDFRRDVEASIKSIIVSHRVTRKIHGALHEETAYGELKITDEKGQKLYAVRKPVSALSHKEITQIADEKIRGAISSYILQKGFDPKDKSDVAKALKEADKNPPKMRSGQPIRRVRLHKPFTKMLLLKNRQGKTYRAMQEGSNHHIVIYEYEDKKGRSKRGGHVVSMFEAAQRARRGEPIIQRKLVDGQRFVMSLSINELVQVPTGENEFEVYRVQKMNSDLTICLRSHTSAIITDKATRRFVKPNTLNGRKVVIDPIGRVYPAND

SEQ ID NO: 5829 - protein, 1025 aa, unidentified
  REGION 1..1025: note = Description of Unknown: uncultivated organism
  REGION 1..1025: note = MG51-3 effector
MTKILGLDLGTNSIGWALLEASDQRGNDFTGIIKSGVRIFQEGVDRTATGAELSKNATRRTARGARKLHKRRNQRREALKKLLIEHALLPTNEQKWQKVMAVNPYKARATLLNTQQKHVNNADKSILFALGRALYHINQRRGFKSNRKSGESDGKVATALVELEQKIHEGGFETLGQYLYSLDPREQRIRGRYTKRSMYEYEFEVLWNHLAPFYPDKLTNALKDKIYYTIFYQRPLKNQKFLVGLCEFEKKKTINKQGEEVWTGKKRSPKGTWYAQQFRLLSEVNNLKVIDGNDEWQLAEDLDLRDKLIANLQKKKTMNFSAIRKLLFNDGNNPWEHIRFNLEEGGRDKLQGNEVEASLRTILKKKHDDLSVEQRDSLVHDLLFIEDESVLLRHCQQLGKALDLSDEQIEKLSKIKLQDGYGHLSEKAMKKLLPYLEQGLKYSDAVEAAGYLRKDQQDDTMIPQLGEPPQLRNPIVQKALYEVRKVVNAIVREYGKPDFIRVEMARDLKQSSKQRKEVSFQNAKNRRRNEEIKKRLQDEYGIHNPSRDDIIKFRLWEECHHQCPYTGKTISAAMLFSSEVEIEHILPYSRTLDDSYINKTLCMSEENKIKGNQTPYEAYHGDNERYQTMLARVRKFAPPFGYKKWNKFRQKEIDLDSFIERQLNDTRYISREVSKYLQQLVGKYGVQSGRGQMTATLRKLWGLNGILHESGEKTREDHRHHAVDAVVTALSTPKALKAVSAASKYGRLDKLSQEQFPMPWDGFRHDIEQSIQSIIVSHRVMRKIRGALHEETAYGALKFTDEKGQKMYAVRKPVTALSHKEITQIADDKIRGAITSYILQKGFDPKVKSDVEKALKEVDKEPPTMQSGQPIKRVRLHKPFSKMRMLKNKKGEPYRAMQEGSNHHIVIYEYQDKRGKTKRGGHVVSMFEAAQRARRGEPIIQRKLEDGQKFIMSLSINELVQVPKGEDEFDVYRVQQISLDTKMMLRLDKAASLGNNDERLIKMPNTLKGQKIVIDPLGKIYPAND

SEQ ID NO: 5830 - protein, 773 aa, unidentified
  REGION 1..773: note = Description of Unknown: uncultivated organism
  REGION 1..773: note = MG51-4 effector
YKRNDRLRNTHSHEKIEDAKARTLGEYLSRIDPFKERTRCRYTSRAMYEHEFDALWDAQRPNHPAILTDDLRRQIHETIFNQRPLKVQKNLVGKCELEPTRKRAPKGLWYAQQFRLLQDVSHLEVLDIKTGEIRKLNDGERKELIAELQKKQTMTFDQIRKTLGMLDGQKFNFETANHRDKLKGNSTEARLRKALAKSYDQLTAQTRDEIVRDLLYLDDADVIRSHAISRWKLNEEAAEKLAGIDLESGYLHLSERALRKLIPHLEQGLSYMEAVVAAGYERPDQRKIEVRKELTREDMPDLRNPIVTVAMNQTRRLVNAIVREHGKPARIRVEMARDLKVSLKKRSEILSENKKNRLETETTDKILEQDFGISNPSRDDRVRYRLWKEAGYACPYSGQTIPKQSLFSPDWEVDHILPLPLSGDDSYLNKVLCATAANRDKGDRTPWQAWHGEETRWDEIVHRIKVLPWPKRKRFEVKEIDTDVFIARQLNDTRYIAREARSYLETLTGKNGVQVGKGGVTAALRRRWGLNGILSDSGEKTRADHRHHAIDAVVIALTTVGVVKRMSRLSALGRRPEDAGFPPPWEHFRDDVKRRVETMLVSHQAQRGLRGPLHEETNYGILGLKDEKGNELFAVRKSLAAMTQSELERVADNNVREIVKAHLRAHGADPEARNAEKTEQWKKAMTPPNYPTLPNGNGAPVPIKKVRLHKPSGGMIRMKNRDGVEYRAVESGSNHHIVIFEHTAEGKKKGGWDGEVVSMFEAGKAIPPTAHII

SEQ ID NO: 5831 - protein, 1070 aa, unidentified
  REGION 1..1070: note = Description of Unknown: uncultivated organism
  REGION 1..1070: note = MG52-1 effector
MFYRLGIDIGETSIGWFILQLDKKLEICDIVDGGVYIFPDGREAKSREPLSVSRRTARGIRRNLDRKNNRKRRLIRLLEETGIWPDGIAEQKKLEALDPFVLRQKAVNEKISLPELGRALFHLNQRRGFKSNRKSDGKESESGKIKLAVQALETQLAEQGCRTYGEYLCRRHEKRISTKVRPMADSKGYEFYPTREMAEHEFDLIMSRQQQYHPELTSEVTEALRDVIFFQRSLRPQAVGKCELEPQENRAPVWHPLFQRFRILQEVNNLDLVKSTPDEIGLTAEQKKKILLMLQEGTGLNKQGLLLFTKIKSKLNIPTKRKFNLQSDKRPGLQGDWAAWKLSDDNCLGKGWFKMSPGRQVELLELLHNAEDDGKLKQDLIDLFGLNEEQAENVAKLNLPEGYASLSLKAIKNILPYLEQGKVYSEACTLAGYNHSDRRTGEIYDYLPYYGRILKSAVIGGRFEGEEPDVDEDIGLQEVYFGKINNPTVHVGLNQLRKVVNEIISRYGKPQQVVVELARELKLGVEGVRELEKRQKENQKDNEKIAEELERAGQPNTYQNRMMYKIWKRLAENPSQRCCPFSGRPISVSDLFSGAFEIEHLIPFSRSFDDSINNKVISSRDANRFKAERTPYEAFGSSPGNYKWEEIVARSENLPREMQWRFSADAMEKFAEEDGCLARMLTDTQYFARCALQYLEAICENQSKDRKMAWGIPGQLTAMLRDKWGLNSLINPADRKDRSDHRHHAVDAFVVACTSRSLLKKMADAARLYEKTDEGEYKQIREKREKLIENMPLPFENFDREKLQQWVNGLVIAFKPDHGVQGQLHRDTCYGYIEKGSNKGSSVFAVRKDLRAVVEGSAKDGNKKINEIADVAIRSKLLDLLQNVEDKKQRQQLTEEFMAETGIRRVRCHIEKSDSVMIPVRDNGGQIYKYYESGNNSRADIYCATKGKDAGKWKCEIISTYSANQKDFVPEWRRRDPHAKLIMKLHINDMVAYDELNKGTGQTERVIARVKKMTSGLVFLRGHLIAKEEGDKLSWGASANQMQEKNLRKVYVDAMGKVKDPMFKNERKVS

SEQ ID NO: 5832 - protein, 1070 aa, unidentified
  REGION 1..1070: note = Description of Unknown: uncultivated organism
  REGION 1..1070: note = MG52-2 effector
MFYRLGIDIGETSIGWFILQLDKKLEICDIVDGGVYIFPDGREAKSREPLSVSRRTARGIRRNLDRKNNRKRRLIRLLEETGIWPDGIAEQKKLEALDPFVLRQEAVNEKISLPELGRALFHLNQRRGFKSNRKSDDKESESGKIKLAVQALETQLAEQGCRTYGEYLCRRHEKRISTKVRPTADSKGYEFYPTREMAEHEFDLIMSRQQQYHPELTSEITEALRDVIFFQRSLRPQAVGKCELEPQENRAPVWHPLFQRFRILQEVNNLDLVKSTPDEIGLTAEQKKKILLMLQEGTGLNKQGLLLFTKIKSKLNIPTKRKFNLQSDKRTGLQGDWAAWKLSDDNCLGKGWFKMSPDRQVELLELLHNAEDDGKLKQDLIDLFGLNEEQAENVAKLNLPEGYASLSLKAIKNILPYLEQGKVYSEACTLAGYNHSDRRTGEIYDYLPYYGRILKSAVIGGRFEGEEPDVDEDIGLQEVYFGKINNPTVHVGLNQLRKVVNEIISRYGKPQQVVVELARELKLGVEGVRKLEKRQKENQKDNEKIAEELERAGQPNTYQNRMMYKIWERLAENPSQRCCPFSGRPISVSDLFSGAFEIEHLIPFSRSFDDSINNKVISSRDANRFKAERTPYEAFGSSPGNYKWEEIVARSENLPREMQWRFSADAMEKFAEEDGCLARMLTDTQYFARCALQYLEAICENQSKDRKMAWGIPGQLTAMLRDKWGLNSLINPADRKDRSDHRHHAVDAFVVACTSRSLLKKMADAARLYEKTDEGEYKQIREKREKLIENMPLPFENFDREKLQQWVNGLVIAFKPDHGVQGQLHRDTCYGYIEKGSNKGSSVFAVRKDLRAVVEGSAKDGNKKINEIADVAIRSKLLDLLQNIEDKKQRQQLTEEFMAETGIRRVRCHIEKSDSVMIPVKDNGGQIYKYYESGNNSRADIYCATKGKDAGKWKCEIISTYSANQKDFVPEWRRRDPHAKLIMKLHINDMVAYDELNKETGQTERVIARVKKMTSGLVYFRSHLIAKEEADKLSKKFSASQMQEKNLRKVYVDAMGKVKDPMFKNERKVS

SEQ ID NO: 5833 - protein, 1070 aa, unidentified
  REGION 1..1070: note = Description of Unknown: uncultivated organism
  REGION 1..1070: note = MG52-3 effector
MFYRLGIDIGETSIGWFILQLDKKLEICDIVDGGVYIFPDGREAKSREPLSVSRRTARGIRRNLDRKNNRKRRLIRLLEETGIWPDGIAEQKKLEALDPFVLRQKAVNEKISLPELGRALFHLNQRRGFKSNRKSDGKESESGKIKLAVQALETQLAEQGCRTYGEYLCRRHEKRISTKVRPTADSKGYEFYPPREMAEHEFDLIMSRQQQYHPELTSEVTEALRDVIFFQRSLRPQAVGKCELEPQENRAPVWHPLFQRFRILQEVNNLDLVKSTPDEIGLTAEQKKKILLMLQEGTGLNKQGLLLFTKIKSKLNIPTKRKFNLQSDKRTGLQGDWAAWKLSDDNCLGKGWFKMSPGRQVELLELLHNAEDDGKLKQDLIDLFGLNEEQAENVAKLNLPEGYASLSLKAIKNILPYLEQGKVYSEACTLAGYNHSDRRTGEIYDYLPYYGRILKSAVIGGRFEGEEPDVDEDIGLQEVYFGKINNPTVHVGLNQLRKVVNEIISRYGKPQQVVVELARELKLGVEGVRKLEKRQKENQKDNEKIAEELERAGQPNTYQNRMMYKIWERLAENPSQRCCPFSGRPISVSDLFSGAFETEHLIPFSRSFDDSINNKVISSRDANRFKAERTPYEAFGNSPGNYKWEEIVARSENLPREMQWRFSADAMEKFAEEDGCLARMLTDTQYFARCALQYLEAICENQSKDRKMAWGIPGQLTAMLRDKWGLNSLINPTDRKDRSDHRHHAVDAFVVACTSRSLLKKMADAARLYEKTDEGEYKQIREKREKLIENMPLPFENFDREKLQQWVNGLVIAFKPDHGVQGQLHRDTCYGYIEKGSNKGSSVFAVRKDLRAVVEGSAKDGNKKINEIADIAIRSKLLDLLQNIEDKKQRQQLTEEFMAETGIRRVRCHIEKSDSVMIPVKDNGGQIYKYYESGNNSRADIYCATKGKDAGKWKCEIISTYSANQKDFVPEWRRRDPHAKLIMKLHINDMVAYDELNKETGQTERVIARVKKMTSGLVFLRGHLIAKEEGDKLSWGASANQMQEKNLRKVYVDAMGKVKDPMFKNERKIS

SEQ ID NO: 5834 - protein, 1070 aa, unidentified
  REGION 1..1070: note = Description of Unknown: uncultivated organism
  REGION 1..1070: note = MG52-4 effector
MFYRLGIDIGETSIGWFILQLDKKLEICDIVDGGVYIFPDGREAKSREPLSVSRRTARGIRRNLDRKNNRKRRLIRLLEETGIWPDGIAEQKKLEALDPFVLRQKAVNEKISLPELGRALFHLNQRRGFKSNRKSDGKESESGKIKLAVQALETQLAEQGCRTYGEYLCRRHEKRISTKVRPTADSKGYEFYPTREMAEHEFDLIMSRQQQYHPELTSEVTEALRDVIFFQRSLRPQAVGKCELEPQENRAPVWHPLFQRFRILQEVNNLDLVKSTPDEIGLTAEQKKKILLMLQEGTGLNKQGLLLFTKIKSKLNIPTKRKFNLQSDKRTGLQGDWAAWKLSDDNCLGKGWFKMSPGRQVELLELLHNAEDDGKLKQDLIDLFGLNEEQAENVAKLNLPEGYASLSLKAIKNILPYLEQGKVYSEACTLAGYNHSDRRTGEIYDYLPYYGRILKSAVIGGRFEGEEPDVDEDIGLQEVYFGKINNPTVHVGLNQLRKVVNEIISRYGKPQQVVVELARELKLGVEGVRKLEKRQKENQKDNEKIAEELERAGQPNTYQNRMMYKIWERLAENPSQRCCPFSGRPISVSDLFSGAFEIEHLIPFSRSFDDSINNKVISSRDANRFKAERTPYEAFGNSPGNYKWEEIVARSENLPREMQWRFSADAMEKFAEEDGCLARMLTDTQYFARCALQYLEAICENQSKDRKMAWGIPGQLTAMLRDKWGLNSLINPTDRKDRSDHRHHAVDAFVVACTSRSLLKKMADAARLYEKTDEGEYKQIREKREKLIENMPLPFENFDREKLQQWVNGLVIAFKPDHGVQGQLHRDTCYGYIEKGSNKGSSVFAVRKDLRAVVEGSAKDGNKKINEIADIAIRSKLLDLLQNIEDKKQRQQLTEEFMAETGIRRVRCHIEKSDSVMIPVKDNGGQIYKYYESGNNSRADIYCATKGKDAGKWKCEIISTYSANQKDFVPEWRRRDPHAKLIMKLHINDMVAYDELNKETGQTERVIARVKKMTSGLVYFRSHLIAKEEADKLSKKFSASQMQEKNLRKVYVDAMGKVKDPMFKNERKVS

SEQ ID NO: 5835 - protein, 1070 aa, unidentified
  REGION 1..1070: note = Description of Unknown: uncultivated organism
  REGION 1..1070: note = MG52-5 effector
MFYRLGIDIGETSIGWFILQLDKKLEICDIVDGGVYIFPDGREAKSREPLSVSRRTARGIRRNLDRKNNRKRRLIRLLEETGIWPDGIAEQKKLEALDPFVLRQKAVNEKISLPELGRVLFHLNQRRGFKSNRKSDGKESESGKIKLAVQALETQLAEQGCRTYGEYLCRRHEKRISTKVRPMADSKGYEFYPTREMAEHEFDLIMSRQQQYHPELTSEITESLRDVIFFQRSLRPQAVGKCELEPQENRAPVWHPLFQRFRILQEVNNLDLVKSTPDEIGLTAEQKKKILLMLQEGTGLNKQGLLLFTKIKSKLNIPTKRKFNLQSDKRTGLQGDWAAWKLSDDNCLGKGWFKMSPDRQVELLELLHNAEDDGKLKQDLIDLFGLNEEQAENVAKLNLPEGYASLSLKAIKNILLYLEQGKVYSEACTLAGYNHSDRRTGEIYDYLPYYGRILKSAVIGGRFEGEEPDVDEDIGLQEVYFGKINNPTVHVGLNQLRKVVNEIISRYGKPQQVVVELARELKLGVEGVRKLEKRQKENQKDNEKIAEELERAGQPNTYQNRMMYKIWERLAENPSQRCCPFSGRPISVSDLFSGAFEIEHLIPFSRSFDDSINNKVISSRDANRFKAERTPYEAFGNSPGNYKWEEIVARSENLPREMQWRFSADAMEKFAEEDGCLARMLTDTQYFARCALQYLEAICENQSKDRKMAWGIPGQLTAMLRDKWGLNSLINPADRKDRSDHRHHAVDAFVVACTSRSLLKKMADAARLYEKTDEGEYKQIREKREKLIENMPLPFENFDREKLQQWVNGLVIAFKPDHGVQGQLHRDTCYGYIEKGSNKGSSVFAVRKDLRAVVEGSAKDGNKKINEIADVAIRSKLLDLLQNVEDKKQRQQLTEEFMAETGIRRVRCHIEKSDSVMIPVRDNGGQIYKYYESGNNSRADIYCATKGKDAGKWKCEIISTYSANQKDFVPEWRRRDPHAKLIMKLHINDMVAYDELNKGTGQTERVIARVKKMTSGLVFLRGHLIAKEEGDKLSWGASANQMQEKNLRKVYVDAMGKVKDPMFKNERKVS

SEQ ID NO: 5836 - protein, 1070 aa, unidentified
  REGION 1..1070: note = Description of Unknown: uncultivated organism
  REGION 1..1070: note = MG52-6 effector
MFYRLGIDIGETSIGWFILQLDKKLEICDIVDGGVYIFPDGREAKSREPLSVSRRTARGIRRNLDRKNNRKRRLIRLLEETGIWPDGIAEQKKLEALDPFVLRQKAVNEKISLPELGRVLFHLNQRRGFKSNRKSDGKESESGKIKLAVQALETQLAEQGCRTYGEYLCRRHEKRISTKVRPMADSKGYEFYPTREMAEHEFDLIMSRQQQYHPELTSEITESLRDVIFFQRSLRPQAVGKCELEPQENRAPVWHPLFQRFRILQEVNNLDLVKSTPDEIGLTAEQKKKILLMLQEGTGLNKQGLLLFTKIKSKLNIPTKRKFNLQSDKRTGLQGDWAAWKLSDDNCLGKGWFKMSPDRQVELLELLHNAEDDGKLKQDLIDLFGLNEEQAENVAKLNLPEGYASLSLKAIKNILLYLEQGKVYSEACTLAGYNHTDRRTGEIYDYLPYYGRILKSAVIGGRFEGEEPDVDEDIGLQEVYFGKINNPTVHVGLNQLRKVVNEIISRYGKPQQVVVELARELKLGVEGVRKLEKRQKENQKDNEKIAEELERAGQPNTYQNRMMYKIWERLAENPSQRCCPFSGRPISVSDLFSGAFEIEHLIPFSRSFDDSINNKVISSRDANRFKAERTPYEAFGNSPGNYKWEEIVARSENLPREMQWRFSADAMEKFAEEDGCLARMLTDTQYFARCALQYLEAICENQSKDRKMAWGIPGQLTAMLRDKWGLNSLINPADRKDRSDHRHHAVDAFVVACTSRSLLKKMADAARLYEKTDEGEYKQIREKREKLIENMPLPFENFDREKLQQWVNGLVIAFKPDHGVQGQLHRDTCYGYIEKGSNKGSSVFAVRKDLRAVVEGSAKDGNKKINEIADVAIRSKLLDLLQNVEDKKQRQQLTEEFMAETGIRRVRCHIEKSDSVMIPVRDNGGQIYKYYESGNNSRADIYCATKGKDAGKWKCEIISTYSANQKDFVPEWRRRDPHAKLIMKLHINDMVAYDELNKGTGQTERVIARVKKMTSGLVFLRGHLIAKEEGDKLSWGASANQMQEKNLRKVYVDAMGKVKDPMFKNERKVS

SEQ ID NO: 5837 - protein, 1070 aa, unidentified
  REGION 1..1070: note = Description of Unknown: uncultivated organism
  REGION 1..1070: note = MG52-7 effector
MFYRLGIDIGETSIGWFILQLDKKLEICDIVDGGVYIFPDGREAKSREPLSVSRRTARGIRRNLDRKNNRKRRLIRLLEETGIWPDGIAEQKKLEALDPFVLRQKAVNEKISLPELGRVLFHLNQRRGFKSNRKSDGKESESGKIKLAVQALETQLAEQGCRTYGEYLCRRHEKRISTKVRPMADSKGYEFYPTREMAEHEFDLIMSRQQQYHPELTSEITESLRDVIFFQRSLRPQAVGKCELEPQENRAPVWHPLFQRFRILQEVNNLDLVKSTPDEIGLTAEQKKKILLMLQEGTGLNKQGLLLFTKIKSKLNIPTKRKFNLQSDKRTGLQGDWAAWKLSDDNCLGKGWFKMSPGRQVELLELLHNAEDDGKLKQDLIDLFGLNEEQAENVAKLNLPEGYASLSLKAIKNILPYLEQGKVYSEACTLAGYNHSDRRTGEIYDYLPYYGRILKSAVIGGRFEGEEPDVDEDISLQEVYFGKINNPTVHVGLNQLRKVVNEIISRYGKPQQVVVELARELKLGVEGVRKLEKRQKENQKDNEKIAEELERAGQPNTYQNRMMYKIWERLAENPSQRCCPFSGRPISVSDLFSGAFEIEHLIPFSRSFDDSINNKVISSRDANRFKAERTPYEAFGNSPGNYKWEEIVARSENLPREMQWRFSADAMEKFAEEDGCLARMLTDTQYFARCALQYLEAICENQSKDRKMAWGIPGQLTAMLRDKWGLNSLINPTDRKDRSDHRHHAVDAFVVACTSRSLLKKMADAARLYEKTDEGEYKQIREKREKLIENMPLPFENFDREKLQQWVNGLVIAFKPDHGVQGQLHRDTCYGYIEKGSNKGSSVFAVRKDLRAVVEGSAKDGNKKINEIADIAIRSKLLDLLQNIEDKKQRQQLTEEFMAETGIRRVRCHIEKSDSVMIPVKDNGGQIYKYYESGNNSRADIYCATKGKDAGKWKCEIISTYSANQKDFVPEWRRRDPHAKLIMKLHINDMVAYDELNKETGQTERVIARVKKMTSGLVYFRSHLIAKEEADKLSKKFSASQMQEKNLRKVYVDAMGKVKDPMFKNERKVS

SEQ ID NO: 5838 - protein, 1070 aa, unidentified
  REGION 1..1070: note = Description of Unknown: uncultivated organism
  REGION 1..1070: note = MG52-8 effector
MFYRLGIDIGETSIGWFILQLDKKLEICDIVDGGVYIFPDGREAKSREPLSVSRRTARGIRRNLDRKNNRKRRLIRLLEETGIWPDGIAEQKKLETLDPFVLRQKAVNEKISLPELGRVLFHLNQRRGFKSNRKSDGKESESGKIKLAVQALETQLAEQGCRTYGEYLCRRHEKRISTKVRPTADSKGYEFYPTREMAEHEFDLIMSRQQQYHPELTSEVTEALRDVIFFQRSLRPQAVGKCELEPQENRAPVWHPLFQRFRILQEVNNLDLVKSTPDEIGLTAEQKKKILLMLQEGTGLNKQGLLLFTKIKSKLNIPTKRKFNLQSDKRTGLQGDWAAWKLSDDNCLGKGWFKISPDRQVELLELLHNAEDDGKLKQDLIDQFSLNEEQAENVAKLNLPEGYASLSLKAIKNILPYLEQGKVYSEACTLAGYNHSDRRTGEIYDYLPYYGRILKSAVIGGRFEGEEPDVDEDIGLQEVYFGKINNPTVHVGLNQLRKVVNEIISRYGKPQQVVVELARELKLGVEGVRKLEKRQKENQKDNEKIAEELERAGQPNTYQNRMMYKIWERLAENPSQRCCPFSGRPISVSDLFSGAFEIEHLIPFSRSFDDSINNKVISSRDANRFKAERTPYEAFGSSPGNYKWEEIVARSENLPREMQWRFSADAMEKFAEEDGCLARMLTDTQYFARCALQYLEAICENQSKDRKMAWGIPGQLTAMLRDKWGLNSLINPADRKDRSDHRHHAVDAFVVACTSRSLLKKMADAARLYEKTDEGEYKQIREKREKLIENMPLPFENFDREKLQQWVNGLVIAFKPDHGVQGQLHRDTCYGYIEKGSNKGSSVFAVRKDLRAVVEGSAKDGNKKINEIADIAIRSKLLDLLQNIEDKKQRQQLTEEFMAETGIRRVRCHLEKSDSVMIPVKDNGGQIYKYYESGNNSRADIYCATKGKDAGKWKCEIISTYSANQKDFVPEWRRRDPHAKLIMKLHINDMVAYEELNKETGQTERVIARVKKMTSGLVFLRGHLIAKEEGDKLSWGASANQMQEKNLRKVYVDAMGKVKDPMFKNERKVS

SEQ ID NO: 5839 - protein, 1070 aa, unidentified
  REGION 1..1070: note = Description of Unknown: uncultivated organism
  REGION 1..1070: note = MG52-9 effector
MFYRLGIDIGETSIGWFILQLDKKLEICDIVDGGVYIFPDGREAKSREPLSVSRRTARGIRRNLDRKNNRKRRLIRLLEETGIWPDGIAEQKKLETLDPFVLRQKAVNEKISLPELGRVLFHLNQRRGFKSNRKSDGKESESGKIKLAVQALETQLAEQGCRTYGEYLCRRHEKRISTKVRPTADSKGYEFYPTREMAEHEFDLIMSRQQQYHPELTSEVTEALRDVIFFQRSLRPQAVGKCELEPQENRAPVWHPLFQRFRILQEVNNLDLVKSTPDEIGLTAEQKKKILLMLQEGTGLNKQGLLLFTKIKSKLNIPTKRKFNLQSDKRTGLQGDWAAWKLSDDNCLGKGWFKMSPGRQVELLELLHNAEDDGKLKQDLIDLFGLNEEQAENVAKLNLPEGYASLSLKAIKNILPYLEQGKVYSEACTLAGYNHSDRRTGEIYDYLPYYGRILKSAVIGGRFEGEEPDVDEDIGLQEVYFGKINNPTVHVGLNQLRKVVNEIISRYGKPQQVVVELARELKLGVEGVRKLEKRQKENQKDNEKIAEELERAGQPNTYQNRMMYKIWERLAENPSQRCCPFSGRPISVSDLFSGAFEIEHLIPFSRSFDDSINNKVISSRDANRFKAERTPYEAFGSSPGNYKWEEIVARSENLPREMQWRFSADAMEKFAEEDGCLARMLTDTQYFARCALQYLEAICENQSKDRKMAWGIPGQLTAMLRDKWGLNSLINPTDRKDRSDHRHHAVDAFVVACTSRSLLKKMADAARLYEKTDEGEYKQIREKREKLIENMPLPFENFDREKLQQWVNGLVIAFKPDHGVQGQLHRDTCYGYIEKGSNKGSSVFAVRKDLRAVVEGSAKDGNKKINEIADIAIRSKLLDLLQNIEDKKQRQQLTEEFMAETGIRRVRCHIEKSDGVMIPVKDNGGQIYKYYESGNNSRADIYCATKGKDAGKWKCEIISTYSANQKDFVPEWRRRDPHAKLIMKLHINDMVAYDELNKETGQTERVIARVKKMTSGLVYFRSHLIAKEEADKLSWGASANQMQEKNLRKVYVDAMGKVKDPMFKNERKVS

SEQ ID NO: 5840 - protein, 1070 aa, unidentified
  REGION 1..1070: note = Description of Unknown: uncultivated organism
  REGION 1..1070: note = MG52-10 effector
MFYRLGIDIGETSIGWFILQLDKKLEICDIVDGGVYIFPDGREAKSREPLSVSRRTARGIRRNLDRKNNRKRRLIRLLEETGIWPDGIAEQKKLETLDPFVLRQKAVNEKISLPELGRVLFHLNQRRGFKSNRKSDGKESESGKIKLAVQALETQLAEQGCRTYGEYLCRRHEKRISTKVRPTADSKGYEFYPTREMAEHEFDLIMSRQQQYHPELTSEVTEALRDVIFFQRSLRPQAVGKCELEPQENRAPVWHPLFQRFRILQEVNNLDLVKSTPDEIGLTAEQKKKILLMLQEGTGLNKQGLLLFTKIKSKLNIPTKRKFNLQSDKRTGLQGDWAAWKLSDDNCLGKGWFKMSPGRQVELLELLHNAEDDGKLKQDLIDLFGLNEEQAENVAKLNLPEGYASLSLKAIKNILPYLEQGKVYSEACTLAGYNHSDRRTGEIYDYLPYYGRILKSAVIGGRFEGEEPDVDEDIGLQEVYFGKINNPTVHVGLNQLRKVVNEIISRYGKPQQVVVELARELKLGVEGVRKLEKRQKENQKDNEKIAEELERAGQPNTYQNRMMYKIWERLAENPSQRCCPFSGRPISVSDLFSGAFEIEHLIPFSRSFDDSINNKVISSRDANRFKAERTPYEAFGSSPGNYKWEEIVARSENLPREMQWRFSADAMEKFAEEDGCLARMLTDTQYFARCALQYLEAICENQSKDRKMAWGIPGQLTAMLRDKWGLNSLINPTDRKDRSDHRHHAVDAFVVACTSRSLLKKMADAARLYEKTDEGEYKQIREKREKLIENMPLPFENFDREKLQQWVNGLVIAFKPDHGVQGQLHRDTCYGYIEKGSNKGSSVFAVRKDLRAVVEGSAKDGNKKINEIADIAIRSKLLDLLQNIEDKKQRQQLTEEFMAETGIRRVRCHIEKSDSVMIPVKDNGGQIYKYYESGNNSRADIYCATKGKDAGKWKCEIISTYSANQKDFVPEWRRRDPHAKLIMKLHINDMVAYDELNKETGQTERVIARVKKMTSGLVYFRSHLIAKEEADKLSWGASANQMQEKNLRKVYVDAMGKVKDPMFKNERKVS

SEQ ID NO: 5841 - protein, 1070 aa, unidentified
  REGION 1..1070: note = Description of Unknown: uncultivated organism
  REGION 1..1070: note = MG52-11 effector
MFYRLGIDIGETSIGWFILQLDKKLEICDIVDGGVYIFPDGREAKSREPLSVSRRTARGIRRNLDRKNNRKRRLIRLLEETGIWPDGIAEQKKLETLDPFVLRQKAVNEKISLPELGRVLFHLNQRRGFKSNRKSDGKESESGKIKLAVQALETQLAEQGCRTYGEYLCRRHEKRISTKVRPTADSKGYEFYPTREMAEHEFDLIMSRQQQYHPELTSEVTEALRDVIFFQRSLRPQAVGKCELEPQENRAPVWHPLFQRFRILQEVNNLDLVKSTPDEIGLTAEQKKKILLMLQEGTGLNKQGLLLFTKIKSKLNIPTKRKFNLQSDKRTGLQGDWAAWKLSDDNCLGKGWFKMSPGRQVELLELLHNAEDDGKLKQDLIDLFGLNEEQAENVAKLNLPEGYASLSLKAIKNILPYLEQGKVYSEACTLAGYNHSDRRTGEIYDYLPYYGRILKSAVIGGRFEGEEPDVDEDIGLQEVYFGKINNPTVHVGLNQLRKVVNEIISRYGKPQQVVVELARELKLGVEGVRKLEKRQKENQKDNEKIAEELERAGQPNTYQNRMMYKIWERLAENPSQRCCPFSGRPISVSDLFSGAFEIEHLIPFSRSFDDSINNKVISSRDANRFKAERTPYEAFGSSPGNYKWEEIVARSENLPREMQWRFSADAMEKFAEEDGCLARMLTDTQYFARCALQYLEAIGENQSKDRKMAWGIPGQLTAMLRDKWGLNSLINPTDRKDRSDHRHHAVDAFVVACTSRSLLKKMADAARLYEKTDEGEYKQIREKREKLIENMPLPFENFDREKLQQWVNGLVIAFKPDHGVQGQLHRDTCYGYIEKGSNKGSSVFAVRKDLRAVVEGSAKDGNKKINEIADIAIRSKLLDLLQNIEDKKQRQQLTEEFMAETGIRRVRCHIEKSDGVMIPVKDNGGQIYKYYESGNNSRADIYCATKGKDAGKWKCEIISTYSANQKDFVPEWRRRDPHAKLIMKLHINDMVAYDELNKETGQTERVIARVKKMTKGLVFLRGHLIAKEEGDKLSWGASANQMQEKNLRKVYVDAMGKVKDPMFKNERKVS

SEQ ID NO: 5842 - protein, 1070 aa, unidentified
  REGION 1..1070: note = Description of Unknown: uncultivated organism
  REGION 1..1070: note = MG52-12 effector
MFYRLGIDIGETSIGWFILQLDKKLEICDIVDGGVYIFPDGREAKSREPLSVSRRTARGIRRNLDRKNNRKRRLIRLLEETGIWSDDIAEQKKLEALDPFVLRQKAVNEKISLPELGRALFHLNQRRGFKSNRKSDGKESESGKIKLAVQALETQLAEQGCRTYGEYLCRRHEKRISTKVRPTADSKGYEFYPTREMAEHEFDLIMSRQQQYHPELTSEVTEALRDVIFFQRSLRPQAVGKCELEPQENRAPVWHPLFQRFRILQEVNNLDLVKSTPDEIGLTAEQKKKILLMLQEGTGLNKQGLLLFTKIKSKLNIPTKRKFNLQSDKRTGLQGDWAAWKLSDDNCLGKGWFKISPDRQVELLELLHNAEDDGKLKQDLIDQFSLNEEQAENVAKLNLPEGYASLSLKAIKNILPYLEQGKVYSEACTLAGYNHSDRRTGEIYDYLPYYGRILKSAVIGGRFEGEEPDVDEDIGLQEVYFGKINNPTVHVGLNQLRKVVNEIISRYGKPQQVVVELARELKLGVEGVRKLEKRQKENQKDNEKIAEELERAGQPNTYQNRMMYKIWERLAENPSQRCCPFSGRPISVSDLFSGAFEIEHLIPFSRSFDDSINNKVISSRDANRFKAERTPYEAFGSSPGNYKWEEIVARSENLPREMQWRFSADAMEKFAEEDGCLARMLTDTQYFARCALQYLEAICENQSKDRKMAWGIPGQLTAMLRDKWGLNSLINPADRKDRSDHRHHAVDAFVVACTSRSLLKKMADAARLYEKTDEGEYKQIREKREKLIENMPLPFENFDREKLQQWVNGLVIAFKPDHGVQGQLHRDTCYGYIEKGSNKGSSVFAVRKDLRAVVEGSAKDGNKKINEIADIAIRSKLLDLLQNIEDKKQRQQLTEEFMAETGIRRVRCHLEKSDSVMIPVKDNGGQIYKYYESGNNSRADIYCATKGKDAGKWKCEIISTYSANQKDFVPEWRRRDPHAKLIMKLHINDMVAYEELNKETGQTERVIARVKKMTSGLVFLRGHLIAKEEGDKLSWGASANQMQEKNLRKVYVDAMGKVKDPMFKNERKVS

SEQ ID NO: 5843 - protein, 1070 aa, unidentified
  REGION 1..1070: note = Description of Unknown: uncultivated organism
  REGION 1..1070: note = MG52-13 effector
MFYRLGIDIGETSIGWFILQLDKKLEICDIVDGGVYIFPDGREAKSREPLSVSRRTARGIRRNLDRKNNRKRRLIRLLEETGIWSDDIAEQKKLEALDPFVLRQKAVNEKISLPELGRALFHLNQRRGFKSNRKSDGKESESGKIKLAVQALETQLAEQGCRTYGEYLCRRHEKRISTKVRPTADSKGYEFYPTREMAEHEFDLIMSRQQQYHPELTSEVTEALRDVIFFQRSLRPQAVGKCELEPQENRAPVWHPLFQRFRILQEVNNLDLVKSTPDEIGLTAEQKKKILLMLQEGTGLNKQGLLLFTKIKSKLNIPTKRKFNLQSDKRTGLQGDWAAWKLSDDNCLGKGWFKISPDRQVELLELLHNAEDDGKLKQDLIDQFSLNEEQAENVAKLNLPEGYASLSLKAIKNILPYLEQGKVYSEACTLAGYNHSDRRTGEIYDYLPYYGRILKSAVIGGRFEGEEPDVDEDIGLQEVYFGKINNPTVHVGLNQLRKVVNEIISRYGKPQQVVVELARELKLGVEGVRKLEKRQKENQKDNEKIAEELERAGQPNTYQNRMMYKIWERLAENPSQRCCPFSGRPISVSDLFSGAFEIEHLIPFSRSFDDSINNKVISSRDANRFKAERTPYEAFGSSPGNYKWEEIVARSENLPREMQWRFSADAMEKFAEEDGCLARMLTDTQYFARCALQYLEAICENQSKDRKMAWGIPGQLTAMLRDKWGLNSLINPTDRKDRSDHRHHAVDAFVVACTSRSLLKKMADAARLYEKTDEGEYKQIREKREKLIENMPLPFENFDREKLQQWVNGLVIAFKPDHGVQGQLHRDTCYGYIEKGSNKGSSVFAVRKDLRAVVEGSAKDGNKKINEIADIAIRSKLLDLLQNIEDKKQRQQLTEEFMAETGIRRVRCHIEKSDSVMIPVKDNGGQIYKYYESGNNSRADIYCATKGKDAGKWKCEIISTYSANQKDFVPEWRRRDPHAKLIMKLHINDMVAYDELNKETGQTERVIARVKKMTSGLVYFRSHLIAKEEADKLSWGASANQMQEKNLRKVYVDAMGKVKDPMFKNERKVS

SEQ ID NO: 5844 - protein, 1070 aa, unidentified
  REGION 1..1070: note = Description of Unknown: uncultivated organism
  REGION 1..1070: note = MG52-14 effector
MFYRLGIDIGETSIGWFILQLDKKLEICDIVDGGVYIFPDGREAKSREPLSVSRRTARGIRRNLDRKNNRKRRLIRLLEKTGIWPDGIAEQKKLEALDPFVLRQKAVNEKISLPELGRALFHLNQRRGFKSNRKSDGKESESGKIKLAVQALETQLAEQGCRTYGEYLCRRHEKRISTKVRPTADSKGYEFYPTREMAEHEFDLIMSRQQQYHPELTSEVTEALRDVIFFQRSLRPQAVGKCELEPQENRAPVWHPLFQRFRILQEVNNLDLVKSTPDEISLTAEQKKKILLMLQEGTGLNKQGLLLFTKIKSKLNIPTKRKFNLQSDKRTGLQGDWAAWKLSDDNCLGKGWFKMSPDRQVELLELLHNAEDDGKLKQDLIDLFGLNEEQAENVAKLNLPEGYASLSLKAIKNILPYLEQGKVYSEACTLAGYNHSDRRTGEIYDYLPYYGRILKSAVIGGRFEGEEPDVDEDIGLQEVYFGKINNPTVHVGLNQLRKVVNEIISRYGKPQQVVVELARELKLGVEGVRKLEKRQKENQKDNEKIAEELERAGQPNTYQNRMMYKIWERLAENPSQRCCPFSGRPISVSDLFSGAFEIEHLIPFSRSFDDSINNKVISSRDANRFKAERTPYEAFGSSPGNYKWEEIVARSENLPREMQWRFSADAMEKFAEEDGCLARMLTDTQYFARCALQYLEAICENQSKDRKMAWGIPGQLTAMLRDKWGLNSLINPADRKDRSDHRHHAVDAFVVACTSRSLLKKMADAARLYEKTDEGEYKQIREKREKLIENMPLPFENFDREKLQQWVNGLVIAFKPDHGVQGQLHRDTCYGYIEKGSNKGSSVFAVRKDLRAVVEGSAQDGNKKINEIADVAIRSKLLDLLQNIEDKKQRQQLTEEFMAETGIRRVRCHIEKSDSVMIPVKDNGGQIYKYYESGNNSRADIYCATKGKDAGKWKCEIISTYSANQKDFVPEWRRRDPHAKLIMKLHINDMVAYDELNKETGQTERVIARVKKMTSGLVYFRSHLIAKEEADKLSKKFSASQMQEKNLRKVYVDAMGKVKDPMLKNERKVS

SEQ ID NO: 5845 - protein, 1045 aa, unidentified
  REGION 1..1045: note = Description of Unknown: uncultivated organism
  REGION 1..1045: note = MG52-15 effector
MKNYRLGIDLGATSLGWSLIELDNNNETVKLEKVGVRIFPDGRDAKSKEPLNVTRRIARGIRRNRDRYLYRKNELIEYLVNNDLMPEDITERKKIEHLDPYYLRAKGLDEKLELFEFGRVIFHLNQRRGFKSNRKLDSQDNESSIMKTAIIELTEKLQETDSRTLGEYLYNLNKDLPIEEMVHSKPRRVKKGDKSYNLFPERTMYLEEFEQLWEKQQKFHPVLTNKTKTNIENIIFYQRPLQPQEKGRCQFEEEEFRCSFAYVTAQKFRIFQELNNLELLDFNKKSHNLTNEQRAIILHVLLMQKTATFKSLRKKLGKEYYNNFTFNLESEKRKDLKGDETSAVMRKDDYFGDKWDELTDIEKDEIVTKILNEENDKEIEATLISWLEKEYFLPEENAQNIANVSLSKKISNLSRKAIRKLLPFLQDGFIYSDACEKAGYKITDEAPEEPKFYQGDLPYYGELFEKDILFGDKVEINKKYPEKYYGKIPNVTVHIALNQLRKFINELSKTYGAPKQIVLELARELKLGKSKVAEIEKIQAKNRKYNENIALELEKINVENNYTNRTKYKLWEELADDPTKRCCPFSGVQIPIHKLFTHEFQIEHILPKSKTFNDRMINKTIAHRKANQDKGERSPFEAFGHDPAGYNYSEILLRAEQLPYAKRRRFFPDAMKHYEDEGEILSRMLTDTQYMSRIARKYMAFVCGKNNVWSINGQLTAMMRSKWGLNDLLSEDSSKNRADHRHHAVDAFVVACTSRSTMQKVARAIGKSRDKFIDEMPPPFAQFKHKEMKRLLDDMIVSFKPDHGNAKKAISEHKTVGQLHKDTAYGLVSKDEEKGKIILSVRKELVSLESVKKIKEIADPRIRATLLQLTEEKTSKEITAILSEFSKETGIKRVKTHIEKAMDTVVRIEDKHGNYKYYELRNNYCADIYCPDKGKKEGKWQVEIIPMFYAHQINFIPNWQKKNPTAKKIMRLYINDTVAYEENGRTEIRRVKKMTIDGRLFFINHIIAKIDKDPNATSVKQMQEKGYRKVGVDILGRVSDPKKAK

SEQ ID NO: 5846 - protein, 1055 aa, unidentified
  REGION 1..1055: note = Description of Unknown: uncultivated organism
  REGION 1..1055: note = MG52-16 effector
MVFLQLDKKLEICDIVDGGVYIFPDGREAKSRDPLSVSRRTARGIRRNLDRKNNRKRRLIRLLEETGIWPDGIAEQKKLEALDPFVLRQKAVNEKISLPELGRALFHLNQRRGFKSNRKSDGKESESGKIKLAVQALETQLAEQGCRTYGEYLCRRHEKRISTKVRPMADSKGYEFYPTREMAEHEFDLIMSRQQQYHPELTSEVTEALRDVIFFQRSLRPQAVGKCELEPQENRAPVWHPLFQRFRILQEVNNLDLVKSTPDEIGLTAEQKKKILLMLQEGTGLNKQGLLLFTKIKSKLNIPTKRKFNLQSDKRPGLQGDWAAWKLSDDNCLGKGWFKMSPGRQVELLELLHNAEDDGKLKQDLIDLFGLNEEQAENVAKLNLPEGYASLSLKAIKNILPYLEQGKVYSEACTLAGYNHSDRRTGEIYDYLPYYGRILKSAVIGGRFEGEEPDVDEDIGLQEVYFGKINNPTVHVGLNQLRKVVNEIISRYGKPQQVVVELARELKLGVEGVRELEKRQKENQKDNEKIAEELERAGQPNTYQNRMMYKIWKRLAENPSQRCCPFSGRPISVSDLFSGAFEIEHLIPFSRSFDDSINNKVISSRDANRFKAERTPYEAFGSSPGNYKWEEIVARSENLPREMQWRFSADAMEKFAEEDGCLARMLTDTQYFARCALQYLEAICENQSKDRKMAWGIPGQLTAMLRDKWGLNSLINPADRKDRSDHRHHAVDAFVVACTSRSLLKKMADAARLYEKTDEGEYKQIREKREKLIENMPLPFENFDREKLQQWVNGLVIAFKPDHGVQGQLHRDTCYGYIEKGSNKGSSVFAVRKDLRAVVEGSAKDGNKKINEIADVAIRSKLLDLLQNVEDKKQRQQLTEEFMAETGIRRVRCHIEKSDSVMIPVRDNGGQIYKYYESGNNSRADIYCATKGKDAGKWKCEIISTYSANQKDFVPEWRRRDPHAKLIMKLHINDMVAYDELNKGTGQTERVIARVKKMTSGLVFLRGHLIAKEEGDKLSWGASANQMQEKNLRKVYVDAMGKVKDPMFKNERKVS

SEQ ID NO: 5847-5861 - skipped (15 entries)

SEQ ID NO: 5862 - DNA, 109 bp, synthetic construct
  source 1..109: mol_type = other DNA
nnnnnnnnnnnnnnnnnnnnnnnngttatagcttgaaaaagctataataatcgaaaaatttcgagtggggctctgacgaactgttttttggcagtagtcatcccctttt

SEQ ID NO: 5863 - DNA, 121 bp, synthetic construct
  source 1..121: mol_type = other DNA
nnnnnnnnnnnnnnnnnnnnnnnngttatagcttcctttcgaaagaaaggaagctataataatcgaaaaatttcgagtggggctctgacgaactgttttttggcagtagtcatcccctttt

SEQ ID NO: 5864 - DNA, 97 bp, synthetic construct
  source 1..97: mol_type = other DNA
nnnnnnnnnnnnnnnnnnnnnnnngttatagcttgaaaaagctataataatcgagaaatttcgagtggggctctgatgcttggcatcatcccctttt

SEQ ID NO: 5865 - DNA, 109 bp, synthetic construct
  source 1..109: mol_type = other DNA
nnnnnnnnnnnnnnnnnnnnnnnngttatagcttgctttcgaaagaaagcaagctataataatcgagaaatttcgagtggggctctgatgcttggcatcatcccctttt

SEQ ID NO: 5866 - DNA, 124 bp, synthetic construct
  source 1..124: mol_type = other DNA
nnnnnnnnnnnnnnnnnnnnnnnngttataggttgaaaaaccgtttatataataaagaatattttctgtggggttttacgattatgtatcccctgatgccgtccccaaaacggggacggctttt

SEQ ID NO: 5867 - DNA, 136 bp, synthetic construct
  source 1..136: mol_type = other DNA
nnnnnnnnnnnnnnnnnnnnnnnngttataggttgcttctgaaaagaagcaaccgtttatataataaagaatattttctgtggggttttacgattatgtatcccctgatgccgtccccaaaacggggacggctttt

SEQ ID NO: 5868 - DNA, 123 bp, synthetic construct
  source 1..123: mol_type = other DNA
nnnnnnnnnnnnnnnnnnnnnnnngttataggttgaaaaaccgtttatataataaagaatattttctgtggggttttacgattacgtatcccctgcgccgtcccccaacgggggacggctttt

SEQ ID NO: 5869 - DNA, 135 bp, synthetic construct
  source 1..135: mol_type = other DNA
nnnnnnnnnnnnnnnnnnnnnnnngttataggttgcttctgaaaagaagcaaccgtttatataataaagaatattttctgtggggttttacgattacgtatcccctgcgccgtcccccaacgggggacggctttt

SEQ ID NO: 5870 - DNA, 121 bp, synthetic construct
  source 1..121: mol_type = other DNA
nnnnnnnnnnnnnnnnnnnnnnnngttataggttgaaaaaccgtttatataataaagaatattttctgtggggttctacgattatgtatcccctgaaaccgtccccctgcggggacggttt

SEQ ID NO: 5871 - DNA, 133 bp, synthetic construct
  source 1..133: mol_type = other DNA
nnnnnnnnnnnnnnnnnnnnnnnngttataggttgcttctgaaaagaagcaaccgtttatataataaagaatattttctgtggggttctacgattatgtatcccctgaaaccgtccccctgcggggacggttt

SEQ ID NO: 5872 - DNA, 121 bp, synthetic construct
  source 1..121: mol_type = other DNA
nnnnnnnnnnnnnnnnnnnnnnnngttataggttgaaaaaccgtttatataataaagaatattttctgtggggttctacgattatgtatcccctgaagccgtccccctgcggggacggttt

SEQ ID NO: 5873 - DNA, 133 bp, synthetic construct
  source 1..133: mol_type = other DNA
nnnnnnnnnnnnnnnnnnnnnnnngttataggttgcttctgaaaagaagcaaccgtttatataataaagaatattttctgtggggttctacgattatgtatcccctgaagccgtccccctgcggggacggttt

SEQ ID NO: 5874 - DNA, 105 bp, synthetic construct
  source 1..105: mol_type = other DNA
nnnnnnnnnnnnnnnnnnnngttgcggcttgaccagaaatggtctttccgttaacaagatgaaagattcacaaaattaaaaggcagagttccgtctctgcctttt

SEQ ID NO: 5875 - DNA, 119 bp, synthetic construct
  source 1..119: mol_type = other DNA
nnnnnnnnnnnnnnnnnnnngttgcggcttgaccactctttcgaaagaaaaggtggtctttccgttaacaagatgaaagattcacaaaattaaaaggcagagttccgtctctgcctttt

SEQ ID NO: 5876 - DNA, 121 bp, synthetic construct
  source 1..121: mol_type = other DNA
nnnnnnnnnnnnnnnnnnnnnnnngttgtagttccctattgaaaaataggttactgcaataaagcccttgtgaaagcatggtgctgtaacccgaaagtgccgcgcttgtcgcggcgctttt

SEQ ID NO: 5877 - DNA, 138 bp, synthetic construct
  source 1..138: mol_type = other DNA
nnnnnnnnnnnnnnnnnnnnnnnngttatcggtccctctattttgaaaaaggaaataaaggttccgatagtaaggcttcctgaataaggaatgccgcacgaagagtggcgtctctcaggaggcgtcactctttgtttt

SEQ ID NO: 5878 - DNA, 89 bp, synthetic construct
  source 1..89: mol_type = other DNA
nnnnnnnnnnnnnnnnnnnngttttggtagaaatatcagaacaagactttatgtcgaaatcacattttcgtttgaaaatggttaatttt

SEQ ID NO: 5879 - DNA, 101 bp, synthetic construct
  source 1..101: mol_type = other DNA
nnnnnnnnnnnnnnnnnnnngttttggtactctggaaacagaatctatcagaacaagactttatgtcgaaatcacattttcgtttgaaaatggttaatttt

SEQ ID NO: 5880 - DNA, 113 bp, synthetic construct
  source 1..113: mol_type = other DNA
nnnnnnnnnnnnnnnnnnnngttttagtagaaatactaaaataagactttatgtcgagttcacattctgtgaagaatggaaatttaattatttatgccataaatggacctttt

SEQ ID NO: 5881 - DNA, 125 bp, synthetic construct
  source 1..125: mol_type = other DNA
nnnnnnnnnnnnnnnnnnnngttttagtactttggaaacaaatcctactaaaataagactttatgtcgagttcacattctgtgaagaatggaaatttaattatttatgccataaatggacctttt

SEQ ID NO: 5882 - DNA, 124 bp, synthetic construct
  source 1..124: mol_type = other DNA
nnnnnnnnnnnnnnnnnnnngttgtggggaaactcataacaaggagttccgcaaggaattccgcaggcaaccactgtccttcgggacgtggacccaccttggccgcccgcaagggcggcctttt

SEQ ID NO: 5883 - DNA, 149 bp, synthetic construct
  source 1..149: mol_type = other DNA
nnnnnnnnnnnnnnnnnnnngttgtgggttgcggacaggcgaaagcctgcgcagcttctcataacaaggagttccgcaaggaattccgcaggcaaccactgtccttcgggacgtggacccaccttggccgcccgcaagggcggcctttt

SEQ ID NO: 5884 - DNA, 129 bp, synthetic construct
  source 1..129: mol_type = other DNA
nnnnnnnnnnnnnnnnnnnngttgtagcgaaagctacaataaggccgtcattcatttgatgtgccgtggggtcactgtccggtcgcaagaccggacatcccctaaaccaccctcactccccatccattt

SEQ ID NO: 5885 - DNA, 147 bp, synthetic construct
  source 1..147: mol_type = other DNA
nnnnnnnnnnnnnnnnnnnngttgtagctccctctctgaaaagagccgttgctacaataaggccgtcattcatttgatgtgccgtggggtcactgtccggtcgcaagaccggacatcccctaaaccaccctcactccccatccattt

SEQ ID NO: 5886 - DNA, 134 bp, synthetic construct
  source 1..134: mol_type = other DNA
actttcgcaagaaagattgtagaaatcaaagaacggtgtctggggttcgccccgttgcgtcgcaagacgcatatccgttaacaaggattttaatccaccaaataagagaccgaacttttgttcggtctcgtttt

SEQ ID NO: 5887 - DNA, 36 bp, synthetic construct
  source 1..36: mol_type = other DNA
gttgcggattgacactggttctttgatttctacaat

SEQ ID NO: 5888 - DNA, 140 bp, synthetic construct
  source 1..140: mol_type = other DNA
nnnnnnnnnnnnnnnnnnnnnnnngttgcggattgacagaaatgtctggggttcgccccgttgcgtcgcaagacgcatatccgttaacaaggattttaatccaccaaataagagaccgaacttttgttcggtctcgtttt

SEQ ID NO: 5889 - DNA, 167 bp, synthetic construct
  source 1..167: mol_type = other DNA
nnnnnnnnnnnnnnnnnnnnnnnngttgcggattgacactggttctttgattgaaaaatcaaagaacggtgtctggggttcgccccgttgcgtcgcaagacgcatatccgttaacaaggattttaatccaccaaataagagaccgaacttttgttcggtctcgtttt

SEQ ID NO: 5890 - DNA, 135 bp, synthetic construct
  source 1..135: mol_type = other DNA
gctttcgaaagaaagattgtagaaatcaaagaatggagtctggggcgcaagccctgttgcgctttcgggcgcatatccgttaacaaggactttcagtccgccaaataagggccgaacattcgttcggcccgtttt

SEQ ID NO: 5891 - DNA, 36 bp, synthetic construct
  source 1..36: mol_type = other DNA
gttgcggattgactactgttctttgatttctacaat

SEQ ID NO: 5892 - DNA, 152 bp, synthetic construct
  source 1..152: mol_type = other DNA
nnnnnnnnnnnnnnnnnnnnnnnngttgcggattgactactgttgaaaaatggagtctggggcgcaagccctgttgcgctttcgggcgcatatccgttaacaaggactttcagtccgccaaataagggccgaacattcgttcggcccgtttt

SEQ ID NO: 5893 - DNA, 122 bp, synthetic construct
  source 1..122: mol_type = other DNA
aatcaaagaacgggctcgaaaatggcaaatcattttcggactttaattaaatttaaagttgtccgttaacaaggaatttatttccaccaaataagggcgatgcttttgcatcgcctcttttt

SEQ ID NO: 5894 - DNA, 36 bp, synthetic construct
  source 1..36: mol_type = other DNA
gttgcggattgacttctgttctttgatttctacatt

SEQ ID NO: 5895 - DNA, 174 bp, synthetic construct
  source 1..174: mol_type = other DNA
nnnnnnnnnnnnnnnnnnnnnnnngttgcggattgacttctgttctttgagaaatcaaagaacgggctcgaaaatggcaaatcattttcggactttaattaaatttaaagttgtccgttaacaaggaatttatttccaccaaataagggcgatgcttttgcatcgcctcttttt

SEQ ID NO: 5896 - DNA, 164 bp, synthetic construct
  source 1..164: mol_type = other DNA
nnnnnnnnnnnnnnnnnnnnnnnngttgcggattgacttctgttcgaaagaacgggctcgaaaatggcaaatcattttcggactttaattaaatttaaagttgtccgttaacaaggaatttatttccaccaaataagggcgatgcttttgcatcgcctcttttt

SEQ ID NO: 5897 - DNA, 22 bp, synthetic construct
  misc_feature 1..22: note = Description of Artificial Sequence: Synthetic oligonucleotide
  misc_feature 1..22: note = MG21 Target 1 in HEK293T cells
  source 1..22: mol_type = other DNA
tccctctttagccagagccggg

SEQ ID NO: 5898 - DNA, 22 bp, synthetic construct
  misc_feature 1..22: note = Description of Artificial Sequence: Synthetic oligonucleotide
  misc_feature 1..22: note = MG21 Target 2 in HEK293T cells
  source 1..22: mol_type = other DNA
ccaaagcccattccctctttag

SEQ ID NO: 5899 - DNA, 22 bp, synthetic construct
  misc_feature 1..22: note = Description of Artificial Sequence: Synthetic oligonucleotide
  misc_feature 1..22: note = MG21 Target 3 in HEK293T cells
  source 1..22: mol_type = other DNA
acggcagtcactagggggcgct

SEQ ID NO: 5900 - DNA, 22 bp, synthetic construct
  misc_feature 1..22: note = Description of Artificial Sequence: Synthetic oligonucleotide
  misc_feature 1..22: note = MG21 Target 4 in HEK293T cells
  source 1..22: mol_type = other DNA
gggggcgctcggccaccacagg

SEQ ID NO: 5901 - DNA, 22 bp, synthetic construct
  misc_feature 1..22: note = Description of Artificial Sequence: Synthetic oligonucleotide
  misc_feature 1..22: note = MG21 Target 5 in HEK293T cells
  source 1..22: mol_type = other DNA
acaactgtgttcactagcaacc

SEQ ID NO: 5902 - DNA, 22 bp, synthetic construct
  misc_feature 1..22: note = Description of Artificial Sequence: Synthetic oligonucleotide
  misc_feature 1..22: note = MG21 Target 6 in HEK293T cells
  source 1..22: mol_type = other DNA
gacaccatggtgcatctgactc

SEQ ID NO: 5903 - DNA, 22 bp, synthetic construct
  misc_feature 1..22: note = Description of Artificial Sequence: Synthetic oligonucleotide
  misc_feature 1..22: note = MG21 Target 7 in HEK293T cells
  source 1..22: mol_type = other DNA
tcactagcaacctcaaacagac

SEQ ID NO: 5904 - DNA, 22 bp, synthetic construct
  misc_feature 1..22: note = Description of Artificial Sequence: Synthetic oligonucleotide
  misc_feature 1..22: note = MG21 Target 8 in HEK293T cells
  source 1..22: mol_type = other DNA
gtatcaaggttacaagacaggt

SEQ ID NO: 5905 - DNA, 22 bp, synthetic construct
  misc_feature 1..22: note = Description of Artificial Sequence: Synthetic oligonucleotide
  misc_feature 1..22: note = MG21 Target 9 in HEK293T cells
  source 1..22: mol_type = other DNA
gctggagcagtactctagtaac

SEQ ID NO: 5906 - DNA, 22 bp, synthetic construct
  misc_feature 1..22: note = Description of Artificial Sequence: Synthetic oligonucleotide
  misc_feature 1..22: note = MG21 Target 10 in HEK293T cells
  source 1..22: mol_type = other DNA
aagcagaagacagaccggctgc

SEQ ID NO: 5907-5916 - skipped (10 entries)

SEQ ID NO: 5917 - DNA, 22 bp, synthetic construct
  misc_feature 1..22: note = Description of Artificial Sequence: Synthetic oligonucleotide
  misc_feature 1..22: note = MG22 Target 1 in HEK293T cells
  source 1..22: mol_type = other DNA
gaaatagggggtccaggagcaa

SEQ ID NO: 5918 - DNA, 22 bp, synthetic construct
  misc_feature 1..22: note = Description of Artificial Sequence: Synthetic oligonucleotide
  misc_feature 1..22: note = MG22 Target 2 in HEK293T cells
  source 1..22: mol_type = other DNA
attccctctttagccagagccg

SEQ ID NO: 5919 - DNA, 22 bp, synthetic construct
  misc_feature 1..22: note = Description of Artificial Sequence: Synthetic oligonucleotide
  misc_feature 1..22: note = MG22 Target 3 in HEK293T cells
  source 1..22: mol_type = other DNA
gaagctgggtgaatggagcgag

SEQ ID NO: 5920 - DNA, 22 bp, synthetic construct
  misc_feature 1..22: note = Description of Artificial Sequence: Synthetic oligonucleotide
  misc_feature 1..22: note = MG22 Target 4 in HEK293T cells
  source 1..22: mol_type = other DNA
ctgacacaactgtgttcactag

SEQ ID NO: 5921 - DNA, 22 bp, synthetic construct
  misc_feature 1..22: note = Description of Artificial Sequence: Synthetic oligonucleotide
  misc_feature 1..22: note = MG22 Target 6 in HEK293T cells
  source 1..22: mol_type = other DNA
gtatcaaggttacaagacaggt

SEQ ID NO: 5922 - DNA, 22 bp, synthetic construct
  misc_feature 1..22: note = Description of Artificial Sequence: Synthetic oligonucleotide
  misc_feature 1..22: note = MG22 Target 7 in HEK293T cells
  source 1..22: mol_type = other DNA
gccgttactgccctgtggggca

SEQ ID NO: 5923 - DNA, 22 bp, synthetic construct
  misc_feature 1..22: note = Description of Artificial Sequence: Synthetic oligonucleotide
  misc_feature 1..22: note = MG22 Target 8 in HEK293T cells
  source 1..22: mol_type = other DNA
ggcagagggtgcatcacctgga

SEQ ID NO: 5924 - DNA, 22 bp, synthetic construct
  misc_feature 1..22: note = Description of Artificial Sequence: Synthetic oligonucleotide
  misc_feature 1..22: note = MG22 Target 9 in HEK293T cells
  source 1..22: mol_type = other DNA
gaatctgctatttgagcaaggc

SEQ ID NO: 5925 - DNA, 22 bp, synthetic construct
  misc_feature 1..22: note = Description of Artificial Sequence: Synthetic oligonucleotide
  misc_feature 1..22: note = MG22 Target 10 in HEK293T cells
  source 1..22: mol_type = other DNA
actaccaagcatcgggcagagg

SEQ ID NO: 5926-5934 - skipped (9 entries)

SEQ ID NO: 5935 - DNA, 22 bp, synthetic construct
  misc_feature 1..22: note = Description of Artificial Sequence: Synthetic oligonucleotide
  misc_feature 1..22: note = MG23 Target 1 in HEK293T cells
  source 1..22: mol_type = other DNA
ggaggtcagaaatagggggtcc

SEQ ID NO: 5936 - DNA, 22 bp, synthetic construct
  misc_feature 1..22: note = Description of Artificial Sequence: Synthetic oligonucleotide
  misc_feature 1..22: note = MG23 Target 2 in HEK293T cells
  source 1..22: mol_type = other DNA
caaagcccattccctctttagc

SEQ ID NO: 5937 - DNA, 22 bp, synthetic construct
  misc_feature 1..22: note = Description of Artificial Sequence: Synthetic oligonucleotide
  misc_feature 1..22: note = MG23 Target 3 in HEK293T cells
  source 1..22: mol_type = other DNA
cggccaccacagggaagctggg

SEQ ID NO: 5938 - DNA, 22 bp, synthetic construct
  misc_feature 1..22: note = Description of Artificial Sequence: Synthetic oligonucleotide
  misc_feature 1..22: note = MG23 Target 5 in HEK293T cells
  source 1..22: mol_type = other DNA
tgtgttcactagcaacctcaaa

SEQ ID NO: 5939 - DNA, 22 bp, synthetic construct
  misc_feature 1..22: note = Description of Artificial Sequence: Synthetic oligonucleotide
  misc_feature 1..22: note = MG23 Target 7 in HEK293T cells
  source 1..22: mol_type = other DNA
ccgttactgccctgtggggcaa

SEQ ID NO: 5940 - DNA, 22 bp, synthetic construct
  misc_feature 1..22: note = Description of Artificial Sequence: Synthetic oligonucleotide
  misc_feature 1..22: note = MG23 Target 8 in HEK293T cells
  source 1..22: mol_type = other DNA
aaggaaactggaacacaaagca

SEQ ID NO: 5941 - DNA, 22 bp, synthetic construct
  misc_feature 1..22: note = Description of Artificial Sequence: Synthetic oligonucleotide
  misc_feature 1..22: note = MG23 Target 9 in HEK293T cells
  source 1..22: mol_type = other DNA
tccagcccgctggccctgtaaa

SEQ ID NO: 5942-5949 - skipped (8 entries)

SEQ ID NO: 5950 - DNA, 22 bp, synthetic construct
  misc_feature 1..22: note = Description of Artificial Sequence: Synthetic oligonucleotide
  misc_feature 1..22: note = MG3-6 TRAC Guide 1
  source 1..22: mol_type = other DNA
ctcaaacaaatgtgtcacaaag

SEQ ID NO: 5951 - DNA, 22 bp, synthetic construct
  misc_feature 1..22: note = Description of Artificial Sequence: Synthetic oligonucleotide
  misc_feature 1..22: note = MG3-6 TRAC Guide 2
  source 1..22: mol_type = other DNA
agagtctctcagctggtacacg

SEQ ID NO: 5952 - DNA, 22 bp, synthetic construct
  misc_feature 1..22: note = Description of Artificial Sequence: Synthetic oligonucleotide
  misc_feature 1..22: note = MG3-6 TRAC Guide 3
  source 1..22: mol_type = other DNA
tctcagctggtacacggcaggg

SEQ ID NO: 5953 - DNA, 22 bp, synthetic construct
  misc_feature 1..22: note = Description of Artificial Sequence: Synthetic oligonucleotide
  misc_feature 1..22: note = MG3-6 TRAC Guide 4
  source 1..22: mol_type = other DNA
ctcagctggtacacggcagggt

SEQ ID NO: 5954 - DNA, 22 bp, synthetic construct
  misc_feature 1..22: note = Description of Artificial Sequence: Synthetic oligonucleotide
  misc_feature 1..22: note = MG3-6 TRAC Guide 5
  source 1..22: mol_type = other DNA
aactttcaaaacctgtcagtga

SEQ ID NO: 5955 - DNA, 22 bp, synthetic construct
  misc_feature 1..22: note = Description of Artificial Sequence: Synthetic oligonucleotide
  misc_feature 1..22: note = MG3-6 TRAC Guide 6
  source 1..22: mol_type = other DNA
cgaatcctcctcctgaaagtgg

SEQ ID NO: 5956 - DNA, 22 bp, synthetic construct
  misc_feature 1..22: note = Description of Artificial Sequence: Synthetic oligonucleotide
  misc_feature 1..22: note = MG3-6 TRAC Guide 7
  source 1..22: mol_type = other DNA
ttaaacccggccactttcagga

SEQ ID NO: 5957 - DNA, 22 bp, synthetic construct
  misc_feature 1..22: note = Description of Artificial Sequence: Synthetic oligonucleotide
  misc_feature 1..22: note = MG3-6 TRAC Guide 8
  source 1..22: mol_type = other DNA
aggattcggaacccaatcactg

SEQ ID NO: 5958 - DNA, 22 bp, synthetic construct
  misc_feature 1..22: note = Description of Artificial Sequence: Synthetic oligonucleotide
  misc_feature 1..22: note = MG3-6 TRAC Guide 9
  source 1..22: mol_type = other DNA
atcactgacaggttttgaaagt

SEQ ID NO: 5959 - DNA, 22 bp, synthetic construct
  misc_feature 1..22: note = Description of Artificial Sequence: Synthetic oligonucleotide
  misc_feature 1..22: note = MG3-8 TRAC Guide 1
  source 1..22: mol_type = other DNA
acagacaaaactgtgctagaca

SEQ ID NO: 5960 - DNA, 22 bp, synthetic construct
  misc_feature 1..22: note = Description of Artificial Sequence: Synthetic oligonucleotide
  misc_feature 1..22: note = MG3-8 TRAC Guide 2
  source 1..22: mol_type = other DNA
gagtctctcagctggtacacgg

SEQ ID NO: 5961 - DNA, 22 bp, synthetic construct
  misc_feature 1..22: note = Description of Artificial Sequence: Synthetic oligonucleotide
  misc_feature 1..22: note = MG3-8 TRAC Guide 3
  source 1..22: mol_type = other DNA
ctcagctggtacacggcagggt

SEQ ID NO: 5962 - DNA, 22 bp, synthetic construct
  misc_feature 1..22: note = Description of Artificial Sequence: Synthetic oligonucleotide
  misc_feature 1..22: note = MG3-8 TRAC Guide 4
  source 1..22: mol_type = other DNA
aactttcaaaacctgtcagtga

SEQ ID NO: 5963 - DNA, 22 bp, synthetic construct
  misc_feature 1..22: note = Description of Artificial Sequence: Synthetic oligonucleotide
  misc_feature 1..22: note = MG3-8 TRAC Guide 5
  source 1..22: mol_type = other DNA
cgaatcctcctcctgaaagtgg

SEQ ID NO: 5964 - DNA, 22 bp, synthetic construct
  misc_feature 1..22: note = Description of Artificial Sequence: Synthetic oligonucleotide
  misc_feature 1..22: note = MG3-8 TRAC Guide 6
  source 1..22: mol_type = other DNA
aggattcggaacccaatcactg

SEQ ID NO: 5965 - DNA, 22 bp, synthetic construct
  misc_feature 1..22: note = Description of Artificial Sequence: Synthetic oligonucleotide
  misc_feature 1..22: note = MG3-8 TRAC Guide 7
  source 1..22: mol_type = other DNA
atcactgacaggttttgaaagt

SEQ ID NO: 5966 - DNA, 20 bp, synthetic construct
  misc_feature 1..20: note = Description of Artificial Sequence: Synthetic oligonucleotide
  misc_feature 1..20: note = MG3-6 TRBC guide 1
  source 1..20: mol_type = other DNA
accagctcagctccacgtgg

SEQ ID NO: 5967 - DNA, 20 bp, synthetic construct
  misc_feature 1..20: note = Description of Artificial Sequence: Synthetic oligonucleotide
  misc_feature 1..20: note = MG3-6 TRBC guide 2
  source 1..20: mol_type = other DNA
acctgcagaagagaaagttt

SEQ ID NO: 5968 - DNA, 20 bp, synthetic construct
  misc_feature 1..20: note = Description of Artificial Sequence: Synthetic oligonucleotide
  misc_feature 1..20: note = MG3-6 TRBC guide 3
  source 1..20: mol_type = other DNA
aggtcaagagaaaggattcc

SEQ ID NO: 5969 - DNA, 20 bp, synthetic construct
  misc_feature 1..20: note = Description of Artificial Sequence: Synthetic oligonucleotide
  misc_feature 1..20: note = MG3-6 TRBC guide 4
  source 1..20: mol_type = other DNA
aggtcctctggaaagggaag

SEQ ID NO: 5970 - DNA, 20 bp, synthetic construct
  misc_feature 1..20: note = Description of Artificial Sequence: Synthetic oligonucleotide
  misc_feature 1..20: note = MG3-6 TRBC guide 5
  source 1..20: mol_type = other DNA
agtatctggagtcattgagg

SEQ ID NO: 5971 - DNA, 20 bp, synthetic construct
  misc_feature 1..20: note = Description of Artificial Sequence: Synthetic oligonucleotide
  misc_feature 1..20: note = MG3-6 TRBC guide 6
  source 1..20: mol_type = other DNA
agtatctggagtcattgagg

SEQ ID NO: 5972 - DNA, 20 bp, synthetic construct
  misc_feature 1..20: note = Description of Artificial Sequence: Synthetic oligonucleotide
  misc_feature 1..20: note = MG3-6 TRBC guide 7
  source 1..20: mol_type = other DNA
atacagggtggccttcccta

SEQ ID NO: 5973 - DNA, 20 bp, synthetic construct
  misc_feature 1..20: note = Description of Artificial Sequence: Synthetic oligonucleotide
  misc_feature 1..20: note = MG3-6 TRBC guide 8
  source 1..20: mol_type = other DNA
atactgcctgagcagccgcc

SEQ ID NO: 5974 - DNA, 20 bp, synthetic construct
  misc_feature 1..20: note = Description of Artificial Sequence: Synthetic oligonucleotide
  misc_feature 1..20: note = MG3-6 TRBC guide 9
  source 1..20: mol_type = other DNA
atactgcctgagcagccgcc

SEQ ID NO: 5975 - DNA, 20 bp, synthetic construct
  misc_feature 1..20: note = Description of Artificial Sequence: Synthetic oligonucleotide
  misc_feature 1..20: note = MG3-6 TRBC guide 10
  source 1..20: mol_type = other DNA
cagatcgtcagcgccgaggc

SEQ ID NO: 5976 - DNA, 20 bp, synthetic construct
  misc_feature 1..20: note = Description of Artificial Sequence: Synthetic oligonucleotide
  misc_feature 1..20: note = MG3-6 TRBC guide 11
  source 1..20: mol_type = other DNA
cagatcgtcagcgccgaggc

SEQ ID NO: 5977 - DNA, 20 bp, synthetic construct
  misc_feature 1..20: note = Description of Artificial Sequence: Synthetic oligonucleotide
  misc_feature 1..20: note = MG3-6 TRBC guide 12
  source 1..20: mol_type = other DNA
caggtcctctggaaagggaa

SEQ ID NO: 5978 - DNA, 20 bp, synthetic construct
  misc_feature 1..20: note = Description of Artificial Sequence: Synthetic oligonucleotide
  misc_feature 1..20: note = MG3-6 TRBC guide 13
  source 1..20: mol_type = other DNA
ccacactggtgtgcctggcc

SEQ ID NO: 5979 - DNA, 20 bp, synthetic construct
  misc_feature 1..20: note = Description of Artificial Sequence: Synthetic oligonucleotide
  misc_feature 1..20: note = MG3-6 TRBC guide 14
  source 1..20: mol_type = other DNA
ccacactggtgtgcctggcc

SEQ ID NO: 5980 - DNA, 20 bp, synthetic construct
  misc_feature 1..20: note = Description of Artificial Sequence: Synthetic oligonucleotide
  misc_feature 1..20: note = MG3-6 TRBC guide 15
  source 1..20: mol_type = other DNA
ccgctgtcaagtccagttct

SEQ ID NO: 5981 - DNA, 20 bp, synthetic construct
  misc_feature 1..20: note = Description of Artificial Sequence: Synthetic oligonucleotide
  misc_feature 1..20: note = MG3-6 TRBC guide 16
  source 1..20: mol_type = other DNA
ccgctgtcaagtccagttct

SEQ ID NO: 5982 - DNA, 20 bp, synthetic construct
  misc_feature 1..20: note = Description of Artificial Sequence: Synthetic oligonucleotide
  misc_feature 1..20: note = MG3-6 TRBC guide 17
  source 1..20: mol_type = other DNA
cctgcagaagagaaagtttt

SEQ ID NO: 5983 - DNA, 20 bp, synthetic construct
  misc_feature 1..20: note = Description of Artificial Sequence: Synthetic oligonucleotide
  misc_feature 1..20: note = MG3-6 TRBC guide 18
  source 1..20: mol_type = other DNA
cggcgctgacgatctgggtg

SEQ ID NO: 5984 - DNA, 20 bp, synthetic construct
  misc_feature 1..20: note = Description of Artificial Sequence: Synthetic oligonucleotide
  misc_feature 1..20: note = MG3-6 TRBC guide 19
  source 1..20: mol_type = other DNA
cggcgctgacgatctgggtg

SEQ ID NO: 5985 - DNA, 20 bp, synthetic construct
  misc_feature 1..20: note = Description of Artificial Sequence: Synthetic oligonucleotide
  misc_feature 1..20: note = MG3-6 TRBC guide 20
  source 1..20: mol_type = other DNA
ctgtggaagagagaacattt

SEQ ID NO: 5986 - DNA, 20 bp, synthetic construct
  misc_feature 1..20: note = Description of Artificial Sequence: Synthetic oligonucleotide
  misc_feature 1..20: note = MG3-6 TRBC guide 21
  source 1..20: mol_type = other DNA
cttccctagcaagatctcat

SEQ ID NO: 5987 - DNA, 20 bp, synthetic construct
  misc_feature 1..20: note = Description of Artificial Sequence: Synthetic oligonucleotide
  misc_feature 1..20: note = MG3-6 TRBC guide 22
  source 1..20: mol_type = other DNA
cttccctagcaggatctcat

SEQ ID NO: 5988 - DNA, 20 bp, synthetic construct
  misc_feature 1..20: note = Description of Artificial Sequence: Synthetic oligonucleotide
  misc_feature 1..20: note = MG3-6 TRBC guide 23
  source 1..20: mol_type = other DNA
cttgacagcggaagtggttg

SEQ ID NO: 5989 - DNA, 20 bp, synthetic construct
  misc_feature 1..20: note = Description of Artificial Sequence: Synthetic oligonucleotide
  misc_feature 1..20: note = MG3-6 TRBC guide 24
  source 1..20: mol_type = other DNA
cttgacagcggaagtggttg

SEQ ID NO: 5990 - DNA, 20 bp, synthetic construct
  misc_feature 1..20: note = Description of Artificial Sequence: Synthetic oligonucleotide
  misc_feature 1..20: note = MG3-6 TRBC guide 25
  source 1..20: mol_type = other DNA
gaatgggaaggaggtgcaca

SEQ ID NO: 5991 - DNA, 20 bp, synthetic construct
  misc_feature 1..20: note = Description of Artificial Sequence: Synthetic oligonucleotide
  misc_feature 1..20: note = MG3-6 TRBC guide 26
  source 1..20: mol_type = other DNA
gaatgggaaggaggtgcaca

SEQ ID NO: 5992 - DNA, 20 bp, synthetic construct
  misc_feature 1..20: note = Description of Artificial Sequence: Synthetic oligonucleotide
  misc_feature 1..20: note = MG3-6 TRBC guide 27
  source 1..20: mol_type = other DNA
gccaacagtgtcctaccagc

SEQ ID NO: 5993 - DNA, 20 bp, synthetic construct
  misc_feature 1..20: note = Description of Artificial Sequence: Synthetic oligonucleotide
  misc_feature 1..20: note = MG3-6 TRBC guide 28
  source 1..20: mol_type = other DNA
gctgatggccatggtaagga

SEQ ID NO: 5994 - DNA, 20 bp, synthetic construct
  misc_feature 1..20: note = Description of Artificial Sequence: Synthetic oligonucleotide
  misc_feature 1..20: note = MG3-6 TRBC guide 29
  source 1..20: mol_type = other DNA
ggcgctgaccagcacagcat

SEQ ID NO: 5995 - DNA, 20 bp, synthetic construct
  misc_feature 1..20: note = Description of Artificial Sequence: Synthetic oligonucleotide
  misc_feature 1..20: note = MG3-6 TRBC guide 30
  source 1..20: mol_type = other DNA
gtcaacagagtcttaccagc

SEQ ID NO: 5996 - DNA, 20 bp, synthetic construct
  misc_feature 1..20: note = Description of Artificial Sequence: Synthetic oligonucleotide
  misc_feature 1..20: note = MG3-6 TRBC guide 31
  source 1..20: mol_type = other DNA
tcggagaatgacgagtggac

SEQ ID NO: 5997 - DNA, 20 bp, synthetic construct
  misc_feature 1..20: note = Description of Artificial Sequence: Synthetic oligonucleotide
  misc_feature 1..20: note = MG3-6 TRBC guide 32
  source 1..20: mol_type = other DNA
tcggagaatgacgagtggac

SEQ ID NO: 5998 - DNA, 20 bp, synthetic construct
  misc_feature 1..20: note = Description of Artificial Sequence: Synthetic oligonucleotide
  misc_feature 1..20: note = MG3-6 TRBC guide 33
  source 1..20: mol_type = other DNA
tctcttccacaggtcaagag

SEQ ID NO: 5999 - DNA, 20 bp, synthetic construct
  misc_feature 1..20: note = Description of Artificial Sequence: Synthetic oligonucleotide
  misc_feature 1..20: note = MG3-6 TRBC guide 34
  source 1..20: mol_type = other DNA
tctcttctgcaggtcaagag

SEQ ID NO: 6000 - DNA, 20 bp, synthetic construct
  misc_feature 1..20: note = Description of Artificial Sequence: Synthetic oligonucleotide
  misc_feature 1..20: note = MG3-6 TRBC guide 35
  source 1..20: mol_type = other DNA
tgagggcgggctgctccttg

SEQ ID NO: 6001 - DNA, 20 bp, synthetic construct
  misc_feature 1..20: note = Description of Artificial Sequence: Synthetic oligonucleotide
  misc_feature 1..20: note = MG3-6 TRBC guide 36
  source 1..20: mol_type = other DNA
tgagggcgggctgctccttg

SEQ ID NO: 6002 - DNA, 20 bp, synthetic construct
  misc_feature 1..20: note = Description of Artificial Sequence: Synthetic oligonucleotide
  misc_feature 1..20: note = MG3-6 TRBC guide 37
  source 1..20: mol_type = other DNA
tgtggaagagagaacatttt

SEQ ID NO: 6003 - DNA, 20 bp, synthetic construct
  misc_feature 1..20: note = Description of Artificial Sequence: Synthetic oligonucleotide
  misc_feature 1..20: note = MG3-6 TRBC guide 38
  source 1..20: mol_type = other DNA
ttgacagcggaagtggttgc

SEQ ID NO: 6004 - DNA, 20 bp, synthetic construct
  misc_feature 1..20: note = Description of Artificial Sequence: Synthetic oligonucleotide
  misc_feature 1..20: note = MG3-6 TRBC guide 39
  source 1..20: mol_type = other DNA
ttgacagcggaagtggttgc

SEQ ID NO: 6005 - DNA, 20 bp, synthetic construct
  misc_feature 1..20: note = Description of Artificial Sequence: Synthetic oligonucleotide
  misc_feature 1..20: note = MG3-8 TRBC Guide 1
  source 1..20: mol_type = other DNA
aatgggaaggaggtgcacag

SEQ ID NO: 6006 - DNA, 20 bp, synthetic construct
  misc_feature 1..20: note = Description of Artificial Sequence: Synthetic oligonucleotide
  misc_feature 1..20: note = MG3-8 TRBC Guide 2
  source 1..20: mol_type = other DNA
aatgggaaggaggtgcacag

SEQ ID NO: 6007 - DNA, 20 bp, synthetic construct
  misc_feature 1..20: note = Description of Artificial Sequence: Synthetic oligonucleotide
  misc_feature 1..20: note = MG3-8 TRBC Guide 3
  source 1..20: mol_type = other DNA
aggtcctctggaaagggaag

SEQ ID NO: 6008 - DNA, 20 bp, synthetic construct
  misc_feature 1..20: note = Description of Artificial Sequence: Synthetic oligonucleotide
  misc_feature 1..20: note = MG3-8 TRBC Guide 4
  source 1..20: mol_type = other DNA
ccaacagtgtcctaccagca

SEQ ID NO: 6009 - DNA, 20 bp, synthetic construct
  misc_feature 1..20: note = Description of Artificial Sequence: Synthetic oligonucleotide
  misc_feature 1..20: note = MG3-8 TRBC Guide 5
  source 1..20: mol_type = other DNA
cctgcagaagagaaagtttt

SEQ ID NO: 6010 - DNA, 20 bp, synthetic construct
  misc_feature 1..20: note = Description of Artificial Sequence: Synthetic oligonucleotide
  misc_feature 1..20: note = MG3-8 TRBC Guide 6
  source 1..20: mol_type = other DNA
cggcgctgacgatctgggtg

SEQ ID NO: 6011 - DNA, 20 bp, synthetic construct
  misc_feature 1..20: note = Description of Artificial Sequence: Synthetic oligonucleotide
  misc_feature 1..20: note = MG3-8 TRBC Guide 7
  source 1..20: mol_type = other DNA
cggcgctgacgatctgggtg

SEQ ID NO: 6012 - DNA, 20 bp, synthetic construct
  misc_feature 1..20: note = Description of Artificial Sequence: Synthetic oligonucleotide
  misc_feature 1..20: note = MG3-8 TRBC Guide 8
  source 1..20: mol_type = other DNA
ctcgggtgggaacaccttgt

SEQ ID NO: 6013 - DNA, 20 bp, synthetic construct
  misc_feature 1..20: note = Description of Artificial Sequence: Synthetic oligonucleotide
  misc_feature 1..20: note = MG3-8 TRBC Guide 9
  source 1..20: mol_type = other DNA
ctgaaaaacgtgttcccacc

SEQ ID NO: 6014 - DNA, 20 bp, synthetic construct
  misc_feature 1..20: note = Description of Artificial Sequence: Synthetic oligonucleotide
  misc_feature 1..20: note = MG3-8 TRBC Guide 10
  source 1..20: mol_type = other DNA
ctgaacaaggtgttcccacc

SEQ ID NO: 6015 - DNA, 20 bp, synthetic construct
  misc_feature 1..20: note = Description of Artificial Sequence: Synthetic oligonucleotide
  misc_feature 1..20: note = MG3-8 TRBC Guide 11
  source 1..20: mol_type = other DNA
cttgggtgggaacacgtttt

SEQ ID NO: 6016 - DNA, 20 bp, synthetic construct
  misc_feature 1..20: note = Description of Artificial Sequence: Synthetic oligonucleotide
  misc_feature 1..20: note = MG3-8 TRBC Guide 12
  source 1..20: mol_type = other DNA
gggctgctccttgaggggct

SEQ ID NO: 6017 - DNA, 20 bp, synthetic construct
  misc_feature 1..20: note = Description of Artificial Sequence: Synthetic oligonucleotide
  misc_feature 1..20: note = MG3-8 TRBC Guide 13
  source 1..20: mol_type = other DNA
gggctgctccttgaggggct

SEQ ID NO: 6018 - DNA, 20 bp, synthetic construct
  misc_feature 1..20: note = Description of Artificial Sequence: Synthetic oligonucleotide
  misc_feature 1..20: note = MG3-8 TRBC Guide 14
  source 1..20: mol_type = other DNA
gtgacaggtttggccctatc

SEQ ID NO: 6019 - DNA, 20 bp, synthetic construct
  misc_feature 1..20: note = Description of Artificial Sequence: Synthetic oligonucleotide
  misc_feature 1..20: note = MG3-8 TRBC Guide 15
  source 1..20: mol_type = other DNA
gtgacgggtttggccctatc

SEQ ID NO: 6020 - DNA, 20 bp, synthetic construct
  misc_feature 1..20: note = Description of Artificial Sequence: Synthetic oligonucleotide
  misc_feature 1..20: note = MG3-8 TRBC Guide 16
  source 1..20: mol_type = other DNA
tactgcctgagcagccgcct

SEQ ID NO: 6021 - DNA, 20 bp, synthetic construct
  misc_feature 1..20: note = Description of Artificial Sequence: Synthetic oligonucleotide
  misc_feature 1..20: note = MG3-8 TRBC Guide 17
  source 1..20: mol_type = other DNA
tactgcctgagcagccgcct

SEQ ID NO: 6022 - DNA, 20 bp, synthetic construct
  misc_feature 1..20: note = Description of Artificial Sequence: Synthetic oligonucleotide
  misc_feature 1..20: note = MG3-8 TRBC Guide 18
  source 1..20: mol_type = other DNA
tcaacagagtcttaccagca

SEQ ID NO: 6023 - DNA, 20 bp, synthetic construct
  misc_feature 1..20: note = Description of Artificial Sequence: Synthetic oligonucleotide
  misc_feature 1..20: note = MG3-8 TRBC Guide 19
  source 1..20: mol_type = other DNA
tgtggaagagagaacatttt

SEQ ID NO: 6024 - DNA, 20 bp, synthetic construct
  misc_feature 1..20: note = Description of Artificial Sequence: Synthetic oligonucleotide
  misc_feature 1..20: note = MG3-8 TRBC Guide 20
  source 1..20: mol_type = other DNA
ttgacagcggaagtggttgc

SEQ ID NO: 6025 - DNA, 20 bp, synthetic construct
  misc_feature 1..20: note = Description of Artificial Sequence: Synthetic oligonucleotide
  misc_feature 1..20: note = MG3-8 TRBC Guide 21
  source 1..20: mol_type = other DNA
ttgacagcggaagtggttgc

SEQ ID NO: 6026 - DNA, 20 bp, synthetic construct
  misc_feature 1..20: note = Description of Artificial Sequence: Synthetic oligonucleotide
  misc_feature 1..20: note = MG3-6 GR GuideMG3-6 GR GuideA1
  source 1..20: mol_type = other DNA
ctcaggagaggggagatgtg

SEQ ID NO: 6027 - DNA, 20 bp, synthetic construct
  misc_feature 1..20: note = Description of Artificial Sequence: Synthetic oligonucleotide
  misc_feature 1..20: note = MG3-6 GR GuideB1
  source 1..20: mol_type = other DNA
ctcctgagcaagcacactgc

SEQ ID NO: 6028 - DNA, 20 bp, synthetic construct
  misc_feature 1..20: note = Description of Artificial Sequence: Synthetic oligonucleotide
  misc_feature 1..20: note = MG3-6 GR GuideC1
  source 1..20: mol_type = other DNA
ctaagaggaggagctactgt

SEQ ID NO: 6029 - DNA, 20 bp, synthetic construct
  misc_feature 1..20: note = Description of Artificial Sequence: Synthetic oligonucleotide
  misc_feature 1..20: note = MG3-6 GR GuideD1
  source 1..20: mol_type = other DNA
ttcacagtagctcctcctct

SEQ ID NO: 6030 - DNA, 20 bp, synthetic construct
  misc_feature 1..20: note = Description of Artificial Sequence: Synthetic oligonucleotide
  misc_feature 1..20: note = MG3-6 GR GuideE1
  source 1..20: mol_type = other DNA
cactggctgtcgcttctcaa

SEQ ID NO: 6031 - DNA, 20 bp, synthetic construct
  misc_feature 1..20: note = Description of Artificial Sequence: Synthetic oligonucleotide
  misc_feature 1..20: note = MG3-6 GR GuideF1
  source 1..20: mol_type = other DNA
tcaatcagactccaagcagc

SEQ ID NO: 6032 - DNA, 20 bp, synthetic construct
  misc_feature 1..20: note = Description of Artificial Sequence: Synthetic oligonucleotide
  misc_feature 1..20: note = MG3-6 GR GuideG1
  source 1..20: mol_type = other DNA
gacttttggttgattttcca

SEQ ID NO: 6033 - DNA, 20 bp, synthetic construct
  misc_feature 1..20: note = Description of Artificial Sequence: Synthetic oligonucleotide
  misc_feature 1..20: note = MG3-6 GR GuideH1
  source 1..20: mol_type = other DNA
cagtaagcaatgcgcagcag

SEQ ID NO: 6034 - DNA, 20 bp, synthetic construct
  misc_feature 1..20: note = Description of Artificial Sequence: Synthetic oligonucleotide
  misc_feature 1..20: note = MG3-6 GR GuideA2
  source 1..20: mol_type = other DNA
caaagcagtttcactctcaa

SEQ ID NO: 6035 - DNA, 20 bp, synthetic construct
  misc_feature 1..20: note = Description of Artificial Sequence: Synthetic oligonucleotide
  misc_feature 1..20: note = MG3-6 GR GuideB2
  source 1..20: mol_type = other DNA
tgagagtgaaactgctttgg

SEQ ID NO: 6036 - DNA, 20 bp, synthetic construct
  misc_feature 1..20: note = Description of Artificial Sequence: Synthetic oligonucleotide
  misc_feature 1..20: note = MG3-6 GR GuideC2
  source 1..20: mol_type = other DNA
aaaagtgatgggaaatgacc

SEQ ID NO: 6037 - DNA, 20 bp, synthetic construct
  misc_feature 1..20: note = Description of Artificial Sequence: Synthetic oligonucleotide
  misc_feature 1..20: note = MG3-6 GR GuideD2
  source 1..20: mol_type = other DNA
atgacctgggattcccacag

SEQ ID NO: 6038 - DNA, 20 bp, synthetic construct
  misc_feature 1..20: note = Description of Artificial Sequence: Synthetic oligonucleotide
  misc_feature 1..20: note = MG3-6 GR GuideE2
  source 1..20: mol_type = other DNA
ttggccctgctgtgggaatc

SEQ ID NO: 6039 - DNA, 20 bp, synthetic construct
  misc_feature 1..20: note = Description of Artificial Sequence: Synthetic oligonucleotide
  misc_feature 1..20: note = MG3-6 GR GuideF2
  source 1..20: mol_type = other DNA
tcagcctttcctcgggggaa

SEQ ID NO: 6040 - DNA, 20 bp, synthetic construct
  misc_feature 1..20: note = Description of Artificial Sequence: Synthetic oligonucleotide
  misc_feature 1..20: note = MG3-6 GR GuideG2
  source 1..20: mol_type = other DNA
taagtctgtttcccccgagg

SEQ ID NO: 6041 - DNA, 20 bp, synthetic construct
  misc_feature 1..20: note = Description of Artificial Sequence: Synthetic oligonucleotide
  misc_feature 1..20: note = MG3-6 GR GuideH2
  source 1..20: mol_type = other DNA
agaaagcattgcaaacctca

SEQ ID NO: 6042 - DNA, 20 bp, synthetic construct
  misc_feature 1..20: note = Description of Artificial Sequence: Synthetic oligonucleotide
  misc_feature 1..20: note = MG3-6 GR GuideA3
  source 1..20: mol_type = other DNA
tggaacactggtcgacctat

SEQ ID NO: 6043 - DNA, 20 bp, synthetic construct
  misc_feature 1..20: note = Description of Artificial Sequence: Synthetic oligonucleotide
  misc_feature 1..20: note = MG3-6 GR GuideB3
  source 1..20: mol_type = other DNA
agcagtggatgctgaactct

SEQ ID NO: 6044 - DNA, 20 bp, synthetic construct
  misc_feature 1..20: note = Description of Artificial Sequence: Synthetic oligonucleotide
  misc_feature 1..20: note = MG3-6 GR GuideC3
  source 1..20: mol_type = other DNA
cttcagaacagcaacatttg

SEQ ID NO: 6045 - DNA, 20 bp, synthetic construct
  misc_feature 1..20: note = Description of Artificial Sequence: Synthetic oligonucleotide
  misc_feature 1..20: note = MG3-6 GR GuideD3
  source 1..20: mol_type = other DNA
gaacagcaacatttgaaggg

SEQ ID NO: 6046 - DNA, 20 bp, synthetic construct
  misc_feature 1..20: note = Description of Artificial Sequence: Synthetic oligonucleotide
  misc_feature 1..20: note = MG3-6 GR GuideE3
  source 1..20: mol_type = other DNA
gcaatgtgaaattgtatacc

SEQ ID NO: 6047 - DNA, 20 bp, synthetic construct
  misc_feature 1..20: note = Description of Artificial Sequence: Synthetic oligonucleotide
  misc_feature 1..20: note = MG3-6 GR GuideF3
  source 1..20: mol_type = other DNA
aaagcacctttgacattttg

SEQ ID NO: 6048 - DNA, 20 bp, synthetic construct
  misc_feature 1..20: note = Description of Artificial Sequence: Synthetic oligonucleotide
  misc_feature 1..20: note = MG3-6 GR GuideG3
  source 1..20: mol_type = other DNA
gcaggatttggagttttctt

SEQ ID NO: 6049 - DNA, 20 bp, synthetic construct
  misc_feature 1..20: note = Description of Artificial Sequence: Synthetic oligonucleotide
  misc_feature 1..20: note = MG3-6 GR GuideH3
  source 1..20: mol_type = other DNA
agagacgaatgagagtcctt

SEQ ID NO: 6050 - DNA, 20 bp, synthetic construct
  misc_feature 1..20: note = Description of Artificial Sequence: Synthetic oligonucleotide
  misc_feature 1..20: note = MG3-6 GR GuideA4
  source 1..20: mol_type = other DNA
tctcattcgtctctttacct

SEQ ID NO: 6051 - DNA, 20 bp, synthetic construct
  misc_feature 1..20: note = Description of Artificial Sequence: Synthetic oligonucleotide
  misc_feature 1..20: note = MG3-6 GR GuideB4
  source 1..20: mol_type = other DNA
tatcaacaggtctgatctcc

SEQ ID NO: 6052 - DNA, 20 bp, synthetic construct
  misc_feature 1..20: note = Description of Artificial Sequence: Synthetic oligonucleotide
  misc_feature 1..20: note = MG3-6 GR GuideC4
  source 1..20: mol_type = other DNA
caaacagttttcatctatca

SEQ ID NO: 6053 - DNA, 20 bp, synthetic construct
  misc_feature 1..20: note = Description of Artificial Sequence: Synthetic oligonucleotide
  misc_feature 1..20: note = MG3-6 GR GuideD4
  source 1..20: mol_type = other DNA
ttttggaaggaaactcgaat

SEQ ID NO: 6054 - DNA, 20 bp, synthetic construct
  misc_feature 1..20: note = Description of Artificial Sequence: Synthetic oligonucleotide
  misc_feature 1..20: note = MG3-6 GR GuideE4
  source 1..20: mol_type = other DNA
aacccaaaattaaggataat

SEQ ID NO: 6055 - DNA, 20 bp, synthetic construct
  misc_feature 1..20: note = Description of Artificial Sequence: Synthetic oligonucleotide
  misc_feature 1..20: note = MG3-6 GR GuideF4
  source 1..20: mol_type = other DNA
gtttagtgtccggtaaaatg

SEQ ID NO: 6056 - DNA, 20 bp, synthetic construct
  misc_feature 1..20: note = Description of Artificial Sequence: Synthetic oligonucleotide
  misc_feature 1..20: note = MG3-6 GR GuideG4
  source 1..20: mol_type = other DNA
gatctccattatccttaatt

SEQ ID NO: 6057 - DNA, 20 bp, synthetic construct
  misc_feature 1..20: note = Description of Artificial Sequence: Synthetic oligonucleotide
  misc_feature 1..20: note = MG3-6 GR GuideH4
  source 1..20: mol_type = other DNA
attactggggcttgacaaaa

SEQ ID NO: 6058 - DNA, 20 bp, synthetic construct
  misc_feature 1..20: note = Description of Artificial Sequence: Synthetic oligonucleotide
  misc_feature 1..20: note = MG3-6 GR GuideA5
  source 1..20: mol_type = other DNA
cccaagtgaaaacagaaaaa

SEQ ID NO: 6059 - DNA, 20 bp, synthetic construct
  misc_feature 1..20: note = Description of Artificial Sequence: Synthetic oligonucleotide
  misc_feature 1..20: note = MG3-6 GR GuideB5
  source 1..20: mol_type = other DNA
ttggggcagtgttacattac

SEQ ID NO: 6060 - DNA, 20 bp, synthetic construct
  misc_feature 1..20: note = Description of Artificial Sequence: Synthetic oligonucleotide
  misc_feature 1..20: note = MG3-6 GR GuideC5
  source 1..20: mol_type = other DNA
cagcatccctttctcaacag

SEQ ID NO: 6061 - DNA, 20 bp, synthetic construct
  misc_feature 1..20: note = Description of Artificial Sequence: Synthetic oligonucleotide
  misc_feature 1..20: note = MG3-6 GR GuideD5
  source 1..20: mol_type = other DNA
ttggtggaatgacattaaaa

SEQ ID NO: 6062 - DNA, 20 bp, synthetic construct
  misc_feature 1..20: note = Description of Artificial Sequence: Synthetic oligonucleotide
  misc_feature 1..20: note = MG3-6 GR GuideE5
  source 1..20: mol_type = other DNA
cgaaaattggaataggtgcc

SEQ ID NO: 6063 - DNA, 20 bp, synthetic construct
  misc_feature 1..20: note = Description of Artificial Sequence: Synthetic oligonucleotide
  misc_feature 1..20: note = MG3-6 GR GuideF5
  source 1..20: mol_type = other DNA
gatgacaacttgacttctct

SEQ ID NO: 6064 - DNA, 20 bp, synthetic construct
  misc_feature 1..20: note = Description of Artificial Sequence: Synthetic oligonucleotide
  misc_feature 1..20: note = MG3-6 GR GuideG5
  source 1..20: mol_type = other DNA
gagaagtcaagttgtcatct

SEQ ID NO: 6065 - DNA, 20 bp, synthetic construct
  misc_feature 1..20: note = Description of Artificial Sequence: Synthetic oligonucleotide
  misc_feature 1..20: note = MG3-6 GR GuideH5
  source 1..20: mol_type = other DNA
tttctaatggctattcaagg

SEQ ID NO: 6066 - DNA, 20 bp, synthetic construct
  misc_feature 1..20: note = Description of Artificial Sequence: Synthetic oligonucleotide
  misc_feature 1..20: note = MG3-6 GR GuideA6
  source 1..20: mol_type = other DNA
ccccttctttagccccagca

SEQ ID NO: 6067 - DNA, 20 bp, synthetic construct
  misc_feature 1..20: note = Description of Artificial Sequence: Synthetic oligonucleotide
  misc_feature 1..20: note = MG3-6 GR GuideB6
  source 1..20: mol_type = other DNA
gcttacatctggtctcatgc

SEQ ID NO: 6068 - DNA, 20 bp, synthetic construct
  misc_feature 1..20: note = Description of Artificial Sequence: Synthetic oligonucleotide
  misc_feature 1..20: note = MG3-6 GR GuideC6
  source 1..20: mol_type = other DNA
cagctcctcaacagcaacaa

SEQ ID NO: 6069 - DNA, 20 bp, synthetic construct
  misc_feature 1..20: note = Description of Artificial Sequence: Synthetic oligonucleotide
  misc_feature 1..20: note = MG3-6 GR GuideD6
  source 1..20: mol_type = other DNA
actttacagcttccacaagt

SEQ ID NO: 6070 - DNA, 20 bp, synthetic construct
  misc_feature 1..20: note = Description of Artificial Sequence: Synthetic oligonucleotide
  misc_feature 1..20: note = MG3-6 GR GuideE6
  source 1..20: mol_type = other DNA
tgccgctatcgaaaatgtct

SEQ ID NO: 6071 - DNA, 20 bp, synthetic construct
  misc_feature 1..20: note = Description of Artificial Sequence: Synthetic oligonucleotide
  misc_feature 1..20: note = MG3-6 GR GuideF6
  source 1..20: mol_type = other DNA
tcagatatttatattacctt

SEQ ID NO: 6072 - DNA, 20 bp, synthetic construct
  misc_feature 1..20: note = Description of Artificial Sequence: Synthetic oligonucleotide
  misc_feature 1..20: note = MG3-6 GR GuideG6
  source 1..20: mol_type = other DNA
aaaaaaataaaaggaattca

SEQ ID NO: 6073 - DNA, 20 bp, synthetic construct
  misc_feature 1..20: note = Description of Artificial Sequence: Synthetic oligonucleotide
  misc_feature 1..20: note = MG3-6 GR GuideH6
  source 1..20: mol_type = other DNA
ggattttcagaggtttcttg

SEQ ID NO: 6074 - DNA, 20 bp, synthetic construct
  misc_feature 1..20: note = Description of Artificial Sequence: Synthetic oligonucleotide
  misc_feature 1..20: note = MG3-6 GR GuideA7
  source 1..20: mol_type = other DNA
gttttgttaccaggattttc

SEQ ID NO: 6075 - DNA, 20 bp, synthetic construct
  misc_feature 1..20: note = Description of Artificial Sequence: Synthetic oligonucleotide
  misc_feature 1..20: note = MG3-6 GR GuideB7
  source 1..20: mol_type = other DNA
aggaactattgttttgttac

SEQ ID NO: 6076 - DNA, 20 bp, synthetic construct
  misc_feature 1..20: note = Description of Artificial Sequence: Synthetic oligonucleotide
  misc_feature 1..20: note = MG3-6 GR GuideC7
  source 1..20: mol_type = other DNA
cctaccctggtgtcactgtt

SEQ ID NO: 6077 - DNA, 20 bp, synthetic construct
  misc_feature 1..20: note = Description of Artificial Sequence: Synthetic oligonucleotide
  misc_feature 1..20: note = MG3-6 GR GuideD7
  source 1..20: mol_type = other DNA
caggatatgatagctctgtt

SEQ ID NO: 6078 - DNA, 20 bp, synthetic construct
  misc_feature 1..20: note = Description of Artificial Sequence: Synthetic oligonucleotide
  misc_feature 1..20: note = MG3-6 GR GuideE7
  source 1..20: mol_type = other DNA
catatcctgcatataacact

SEQ ID NO: 6079 - DNA, 20 bp, synthetic construct
  misc_feature 1..20: note = Description of Artificial Sequence: Synthetic oligonucleotide
  misc_feature 1..20: note = MG3-6 GR GuideF7
  source 1..20: mol_type = other DNA
tctgttccagactcaacttg

SEQ ID NO: 6080 - DNA, 20 bp, synthetic construct
  misc_feature 1..20: note = Description of Artificial Sequence: Synthetic oligonucleotide
  misc_feature 1..20: note = MG3-6 GR GuideG7
  source 1..20: mol_type = other DNA
aacatccaggagtactgcag

SEQ ID NO: 6081 - DNA, 20 bp, synthetic construct
  misc_feature 1..20: note = Description of Artificial Sequence: Synthetic oligonucleotide
  misc_feature 1..20: note = MG3-6 GR GuideH7
  source 1..20: mol_type = other DNA
tatggcatttgctctggggt

SEQ ID NO: 6082 - DNA, 20 bp, synthetic construct
  misc_feature 1..20: note = Description of Artificial Sequence: Synthetic oligonucleotide
  misc_feature 1..20: note = MG3-6 GR GuideA8
  source 1..20: mol_type = other DNA
cagatcaggagcaaaacaca

SEQ ID NO: 6083 - DNA, 20 bp, synthetic construct
  misc_feature 1..20: note = Description of Artificial Sequence: Synthetic oligonucleotide
  misc_feature 1..20: note = MG3-6 GR GuideB8
  source 1..20: mol_type = other DNA
tacaacttactcattaataa

SEQ ID NO: 6084 - DNA, 20 bp, synthetic construct
  misc_feature 1..20: note = Description of Artificial Sequence: Synthetic oligonucleotide
  misc_feature 1..20: note = MG3-6 GR GuideC8
  source 1..20: mol_type = other DNA
gtatgtttcctctgagttac

SEQ ID NO: 6085 - DNA, 20 bp, synthetic construct
  misc_feature 1..20: note = Description of Artificial Sequence: Synthetic oligonucleotide
  misc_feature 1..20: note = MG3-6 GR GuideD8
  source 1..20: mol_type = other DNA
aaaccttactgcttctctct

SEQ ID NO: 6086 - DNA, 20 bp, synthetic construct
  misc_feature 1..20: note = Description of Artificial Sequence: Synthetic oligonucleotide
  misc_feature 1..20: note = MG3-6 GR GuideE8
  source 1..20: mol_type = other DNA
caacctgaagagagaagcag

SEQ ID NO: 6087 - DNA, 20 bp, synthetic construct
  misc_feature 1..20: note = Description of Artificial Sequence: Synthetic oligonucleotide
  misc_feature 1..20: note = MG3-6 GR GuideF8
  source 1..20: mol_type = other DNA
cagaccgtccttaggaacta

SEQ ID NO: 6088 - DNA, 20 bp, synthetic construct
  misc_feature 1..20: note = Description of Artificial Sequence: Synthetic oligonucleotide
  misc_feature 1..20: note = MG3-6 GR GuideG8
  source 1..20: mol_type = other DNA
atcaaatagctcttggctct

SEQ ID NO: 6089 - DNA, 20 bp, synthetic construct
  misc_feature 1..20: note = Description of Artificial Sequence: Synthetic oligonucleotide
  misc_feature 1..20: note = MG3-6 GR GuideH8
  source 1..20: mol_type = other DNA
gcttttcctagctctttgat

SEQ ID NO: 6090 - DNA, 20 bp, synthetic construct
  misc_feature 1..20: note = Description of Artificial Sequence: Synthetic oligonucleotide
  misc_feature 1..20: note = MG3-6 GR GuideA9
  source 1..20: mol_type = other DNA
tttatcaactgacaaaactc

SEQ ID NO: 6091 - DNA, 20 bp, synthetic construct
  misc_feature 1..20: note = Description of Artificial Sequence: Synthetic oligonucleotide
  misc_feature 1..20: note = MG3-8 GR Guide B9
  source 1..20: mol_type = other DNA
ctcctgagcaagcacactgc

SEQ ID NO: 6092 - DNA, 20 bp, synthetic construct
  misc_feature 1..20: note = Description of Artificial Sequence: Synthetic oligonucleotide
  misc_feature 1..20: note = MG3-8 GR Guide C9
  source 1..20: mol_type = other DNA
ctaagaggaggagctactgt

SEQ ID NO: 6093 - DNA, 20 bp, synthetic construct
  misc_feature 1..20: note = Description of Artificial Sequence: Synthetic oligonucleotide
  misc_feature 1..20: note = MG3-8 GR Guide D9
  source 1..20: mol_type = other DNA
ttcacagtagctcctcctct

SEQ ID NO: 6094 - DNA, 20 bp, synthetic construct
  misc_feature 1..20: note = Description of Artificial Sequence: Synthetic oligonucleotide
  misc_feature 1..20: note = MG3-8 GR Guide E9
  source 1..20: mol_type = other DNA
gacttttggttgattttcca

SEQ ID NO: 6095 - DNA, 20 bp, synthetic construct
  misc_feature 1..20: note = Description of Artificial Sequence: Synthetic oligonucleotide
  misc_feature 1..20: note = MG3-8 GR Guide F9
  source 1..20: mol_type = other DNA
atgacctgggattcccacag

SEQ ID NO: 6096 - DNA, 20 bp, synthetic construct
  misc_feature 1..20: note = Description of Artificial Sequence: Synthetic oligonucleotide
  misc_feature 1..20: note = MG3-8 GR Guide G9
  source 1..20: mol_type = other DNA
ttggccctgctgtgggaatc

SEQ ID NO: 6097 - DNA, 20 bp, synthetic construct
  misc_feature 1..20: note = Description of Artificial Sequence: Synthetic oligonucleotide
  misc_feature 1..20: note = MG3-8 GR Guide H9
  source 1..20: mol_type = other DNA
taagtctgtttcccccgagg

SEQ ID NO: 6098 - DNA, 20 bp, synthetic construct
  misc_feature 1..20: note = Description of Artificial Sequence: Synthetic oligonucleotide
  misc_feature 1..20: note = MG3-8 GR Guide A10
  source 1..20: mol_type = other DNA
agaaagcattgcaaacctca

SEQ ID NO: 6099 - DNA, 20 bp, synthetic construct
  misc_feature 1..20: note = Description of Artificial Sequence: Synthetic oligonucleotide
  misc_feature 1..20: note = MG3-8 GR Guide B10
  source 1..20: mol_type = other DNA
tggaacactggtcgacctat

SEQ ID NO: 6100 - DNA, 20 bp, synthetic construct
  misc_feature 1..20: note = Description of Artificial Sequence: Synthetic oligonucleotide
  misc_feature 1..20: note = MG3-8 GR Guide C10
  source 1..20: mol_type = other DNA
agcagtggatgctgaactct

SEQ ID NO: 6101 - DNA, 20 bp, synthetic construct
  misc_feature 1..20: note = Description of Artificial Sequence: Synthetic oligonucleotide
  misc_feature 1..20: note = MG3-8 GR Guide D10
  source 1..20: mol_type = other DNA
cttcagaacagcaacatttg

SEQ ID NO: 6102 - DNA, 20 bp, synthetic construct
  misc_feature 1..20: note = Description of Artificial Sequence: Synthetic oligonucleotide
  misc_feature 1..20: note = MG3-8 GR Guide E10
  source 1..20: mol_type = other DNA
gcaggatttggagttttctt

SEQ ID NO: 6103 - DNA, 20 bp, synthetic construct
  misc_feature 1..20: note = Description of Artificial Sequence: Synthetic oligonucleotide
  misc_feature 1..20: note = MG3-8 GR Guide F10
  source 1..20: mol_type = other DNA
caaacagttttcatctatca

SEQ ID NO: 6104 - DNA, 20 bp, synthetic construct
  misc_feature 1..20: note = Description of Artificial Sequence: Synthetic oligonucleotide
  misc_feature 1..20: note = MG3-8 GR Guide G10
  source 1..20: mol_type = other DNA
gtttagtgtccggtaaaatg

SEQ ID NO: 6105 - DNA, 20 bp, synthetic construct
  misc_feature 1..20: note = Description of Artificial Sequence: Synthetic oligonucleotide
  misc_feature 1..20: note = MG3-8 GR Guide H10
  source 1..20: mol_type = other DNA
gatctccattatccttaatt

SEQ ID NO: 6106 - DNA, 20 bp, synthetic construct
  misc_feature 1..20: note = Description of Artificial Sequence: Synthetic oligonucleotide
  misc_feature 1..20: note = MG3-8 GR Guide A11
  source 1..20: mol_type = other DNA
ttggggcagtgttacattac

SEQ ID NO: 6107 - DNA, 20 bp, synthetic construct
  misc_feature 1..20: note = Description of Artificial Sequence: Synthetic oligonucleotide
  misc_feature 1..20: note = MG3-8 GR Guide B11
  source 1..20: mol_type = other DNA
ttggtggaatgacattaaaa

SEQ ID NO: 6108 - DNA, 20 bp, synthetic construct
  misc_feature 1..20: note = Description of Artificial Sequence: Synthetic oligonucleotide
  misc_feature 1..20: note = MG3-8 GR Guide C11
  source 1..20: mol_type = other DNA
gcttacatctggtctcatgc

SEQ ID NO: 6109 - DNA, 20 bp, synthetic construct
  misc_feature 1..20: note = Description of Artificial Sequence: Synthetic oligonucleotide
  misc_feature 1..20: note = MG3-8 GR Guide D11
  source 1..20: mol_type = other DNA
tgccgctatcgaaaatgtct

SEQ ID NO: 6110 - DNA, 20 bp, synthetic construct
  misc_feature 1..20: note = Description of Artificial Sequence: Synthetic oligonucleotide
  misc_feature 1..20: note = MG3-8 GR Guide E11
  source 1..20: mol_type = other DNA
tcagatatttatattacctt

SEQ ID NO: 6111 - DNA, 20 bp, synthetic construct
  misc_feature 1..20: note = Description of Artificial Sequence: Synthetic oligonucleotide
  misc_feature 1..20: note = MG3-8 GR Guide F11
  source 1..20: mol_type = other DNA
aaaaaaataaaaggaattca

SEQ ID NO: 6112 - DNA, 20 bp, synthetic construct
  misc_feature 1..20: note = Description of Artificial Sequence: Synthetic oligonucleotide
  misc_feature 1..20: note = MG3-8 GR Guide G11
  source 1..20: mol_type = other DNA
gttttgttaccaggattttc

SEQ ID NO: 6113 - DNA, 20 bp, synthetic construct
  misc_feature 1..20: note = Description of Artificial Sequence: Synthetic oligonucleotide
  misc_feature 1..20: note = MG3-8 GR Guide H11
  source 1..20: mol_type = other DNA
cctaccctggtgtcactgtt

SEQ ID NO: 6114 - DNA, 20 bp, synthetic construct
  misc_feature 1..20: note = Description of Artificial Sequence: Synthetic oligonucleotide
  misc_feature 1..20: note = MG3-8 GR Guide A12
  source 1..20: mol_type = other DNA
catatcctgcatataacact

SEQ ID NO: 6115 - DNA, 20 bp, synthetic construct
  misc_feature 1..20: note = Description of Artificial Sequence: Synthetic oligonucleotide
  misc_feature 1..20: note = MG3-8 GR Guide B12
  source 1..20: mol_type = other DNA
aacatccaggagtactgcag

SEQ ID NO: 6116 - DNA, 20 bp, synthetic construct
  misc_feature 1..20: note = Description of Artificial Sequence: Synthetic oligonucleotide
  misc_feature 1..20: note = MG3-8 GR Guide C12
  source 1..20: mol_type = other DNA
cagatcaggagcaaaacaca

SEQ ID NO: 6117 - DNA, 20 bp, synthetic construct
  misc_feature 1..20: note = Description of Artificial Sequence: Synthetic oligonucleotide
  misc_feature 1..20: note = MG3-8 GR Guide D12
  source 1..20: mol_type = other DNA
gtatgtttcctctgagttac

SEQ ID NO: 6118 - DNA, 20 bp, synthetic construct
  misc_feature 1..20: note = Description of Artificial Sequence: Synthetic oligonucleotide
  misc_feature 1..20: note = MG3-8 GR Guide E12
  source 1..20: mol_type = other DNA
aaaccttactgcttctctct

SEQ ID NO: 6119 - DNA, 20 bp, synthetic construct
  misc_feature 1..20: note = Description of Artificial Sequence: Synthetic oligonucleotide
  misc_feature 1..20: note = MG3-8 GR Guide F12
  source 1..20: mol_type = other DNA
caacctgaagagagaagcag

SEQ ID NO: 6120 - DNA, 20 bp, synthetic construct
  misc_feature 1..20: note = Description of Artificial Sequence: Synthetic oligonucleotide
  misc_feature 1..20: note = MG3-8 GR Guide G12
  source 1..20: mol_type = other DNA
cagaccgtccttaggaacta

SEQ ID NO: 6121 - DNA, 20 bp, synthetic construct
  misc_feature 1..20: note = Description of Artificial Sequence: Synthetic oligonucleotide
  misc_feature 1..20: note = MG3-8 GR Guide H12
  source 1..20: mol_type = other DNA
gcttttcctagctctttgat

SEQ ID NO: 6122 - DNA, 22 bp, synthetic construct
  misc_feature 1..22: note = Description of Artificial Sequence: Synthetic oligonucleotide
  misc_feature 1..22: note = MG3-6 AAVS1 GuideA1
  source 1..22: mol_type = other DNA
cctcaccacagccctgccagga

SEQ ID NO: 6123 - DNA, 22 bp, synthetic construct
  misc_feature 1..22: note = Description of Artificial Sequence: Synthetic oligonucleotide
  misc_feature 1..22: note = MG3-6 AAVS1 GuideB1
  source 1..22: mol_type = other DNA
gaagtgtaaggaagctgcagca

SEQ ID NO: 6124 - DNA, 22 bp, synthetic construct
  misc_feature 1..22: note = Description of Artificial Sequence: Synthetic oligonucleotide
  misc_feature 1..22: note = MG3-6 AAVS1 GuideC1
  source 1..22: mol_type = other DNA
cagacggccgcgtcagagcagc

SEQ ID NO: 6125 - DNA, 22 bp, synthetic construct
  misc_feature 1..22: note = Description of Artificial Sequence: Synthetic oligonucleotide
  misc_feature 1..22: note = MG3-6 AAVS1 GuideD1
  source 1..22: mol_type = other DNA
tcagagcagctcaggttctggg

SEQ ID NO: 6126 - DNA, 22 bp, synthetic construct
  misc_feature 1..22: note = Description of Artificial Sequence: Synthetic oligonucleotide
  misc_feature 1..22: note = MG3-6 AAVS1 GuideE1
  source 1..22: mol_type = other DNA
tcaggttctgggagagggtagc

SEQ ID NO: 6127 - DNA, 22 bp, synthetic construct
  misc_feature 1..22: note = Description of Artificial Sequence: Synthetic oligonucleotide
  misc_feature 1..22: note = MG3-6 AAVS1 GuideF1
  source 1..22: mol_type = other DNA
accccctgccaagctctccctc

SEQ ID NO: 6128 - DNA, 22 bp, synthetic construct
  misc_feature 1..22: note = Description of Artificial Sequence: Synthetic oligonucleotide
  misc_feature 1..22: note = MG3-6 AAVS1 GuideG1
  source 1..22: mol_type = other DNA
ggctccatcgtaagcaaacctt

SEQ ID NO: 6129 - DNA, 22 bp, synthetic construct
  misc_feature 1..22: note = Description of Artificial Sequence: Synthetic oligonucleotide
  misc_feature 1..22: note = MG3-6 AAVS1 GuideH1
  source 1..22: mol_type = other DNA
ggagagagatggctccaggaaa

SEQ ID NO: 6130 - DNA, 22 bp, synthetic construct
  misc_feature 1..22: note = Description of Artificial Sequence: Synthetic oligonucleotide
  misc_feature 1..22: note = MG3-6 AAVS1 GuideA2
  source 1..22: mol_type = other DNA
aaggaatctgcctaacaggagg

SEQ ID NO: 6131 - DNA, 22 bp, synthetic construct
  misc_feature 1..22: note = Description of Artificial Sequence: Synthetic oligonucleotide
  misc_feature 1..22: note = MG3-6 AAVS1 GuideB2
  source 1..22: mol_type = other DNA
aggaatctgcctaacaggaggt

SEQ ID NO: 6132 - DNA, 22 bp, synthetic construct
  misc_feature 1..22: note = Description of Artificial Sequence: Synthetic oligonucleotide
  misc_feature 1..22: note = MG3-6 AAVS1 GuideC2
  source 1..22: mol_type = other DNA
ggagactaggaaggaggaggcc

SEQ ID NO: 6133 - DNA, 22 bp, synthetic construct
  misc_feature 1..22: note = Description of Artificial Sequence: Synthetic oligonucleotide
  misc_feature 1..22: note = MG3-6 AAVS1 GuideD2
  source 1..22: mol_type = other DNA
taggaaggaggaggcctaagga

SEQ ID NO: 6134 - DNA, 22 bp, synthetic construct
  misc_feature 1..22: note = Description of Artificial Sequence: Synthetic oligonucleotide
  misc_feature 1..22: note = MG3-6 AAVS1 GuideE2
  source 1..22: mol_type = other DNA
tcctgtccctagtggccccact

SEQ ID NO: 6135 - DNA, 22 bp, synthetic construct
  misc_feature 1..22: note = Description of Artificial Sequence: Synthetic oligonucleotide
  misc_feature 1..22: note = MG3-6 AAVS1 GuideF2
  source 1..22: mol_type = other DNA
aaggtggtcccagctcggggac

SEQ ID NO: 6136 - DNA, 22 bp, synthetic construct
  misc_feature 1..22: note = Description of Artificial Sequence: Synthetic oligonucleotide
  misc_feature 1..22: note = MG3-6 AAVS1 GuideG2
  source 1..22: mol_type = other DNA
gtcctgaagtggacataggggc

SEQ ID NO: 6137 - DNA, 22 bp, synthetic construct
  misc_feature 1..22: note = Description of Artificial Sequence: Synthetic oligonucleotide
  misc_feature 1..22: note = MG3-6 AAVS1 GuideH2
  source 1..22: mol_type = other DNA
acccctggaagatgccatgaca

SEQ ID NO: 6138 - DNA, 22 bp, synthetic construct
  misc_feature 1..22: note = Description of Artificial Sequence: Synthetic oligonucleotide
  misc_feature 1..22: note = MG3-6 AAVS1 GuideA3
  source 1..22: mol_type = other DNA
ctagcacagactagagaggtaa

SEQ ID NO: 6139 - DNA, 22 bp, synthetic construct
  misc_feature 1..22: note = Description of Artificial Sequence: Synthetic oligonucleotide
  misc_feature 1..22: note = MG3-6 AAVS1 GuideB3
  source 1..22: mol_type = other DNA
ggtgacccgaatccacaggaga

SEQ ID NO: 6140 - DNA, 22 bp, synthetic construct
  misc_feature 1..22: note = Description of Artificial Sequence: Synthetic oligonucleotide
  misc_feature 1..22: note = MG3-6 AAVS1 GuideC3
  source 1..22: mol_type = other DNA
gggtgtccaggcaaagaaagca

SEQ ID NO: 6141 - DNA, 22 bp, synthetic construct
  misc_feature 1..22: note = Description of Artificial Sequence: Synthetic oligonucleotide
  misc_feature 1..22: note = MG3-6 AAVS1 GuideD3
  source 1..22: mol_type = other DNA
agaggtggctaaagccagggag

SEQ ID NO: 6142 - DNA, 22 bp, synthetic construct
  misc_feature 1..22: note = Description of Artificial Sequence: Synthetic oligonucleotide
  misc_feature 1..22: note = MG3-6 AAVS1 GuideE3
  source 1..22: mol_type = other DNA
aaagccagggagacggggtact

SEQ ID NO: 6143 - DNA, 22 bp, synthetic construct
  misc_feature 1..22: note = Description of Artificial Sequence: Synthetic oligonucleotide
  misc_feature 1..22: note = MG3-6 AAVS1 GuideF3
  source 1..22: mol_type = other DNA
aagccagggagacggggtactt

SEQ ID NO: 6144 - DNA, 22 bp, synthetic construct
  misc_feature 1..22: note = Description of Artificial Sequence: Synthetic oligonucleotide
  misc_feature 1..22: note = MG3-6 AAVS1 GuideG3
  source 1..22: mol_type = other DNA
ggcctgtgccatctctcgtttc

SEQ ID NO: 6145 - DNA, 22 bp, synthetic construct
  misc_feature 1..22: note = Description of Artificial Sequence: Synthetic oligonucleotide
  misc_feature 1..22: note = MG3-6 AAVS1 GuideH3
  source 1..22: mol_type = other DNA
agccccctgtcatggcatcttc

SEQ ID NO: 6146 - DNA, 22 bp, synthetic construct
  misc_feature 1..22: note = Description of Artificial Sequence: Synthetic oligonucleotide
  misc_feature 1..22: note = MG3-6 AAVS1 GuideA4
  source 1..22: mol_type = other DNA
aggacagcatgtttgctgcctc

SEQ ID NO: 6147 - DNA, 22 bp, synthetic construct
  misc_feature 1..22: note = Description of Artificial Sequence: Synthetic oligonucleotide
  misc_feature 1..22: note = MG3-6 AAVS1 GuideB4
  source 1..22: mol_type = other DNA
ccccacagtggggccactaggg

SEQ ID NO: 6148 - DNA, 22 bp, synthetic construct
  misc_feature 1..22: note = Description of Artificial Sequence: Synthetic oligonucleotide
  misc_feature 1..22: note = MG3-6 AAVS1 GuideC4
  source 1..22: mol_type = other DNA
tctctctccttgccagaacctc

SEQ ID NO: 6149 - DNA, 22 bp, synthetic construct
  misc_feature 1..22: note = Description of Artificial Sequence: Synthetic oligonucleotide
  misc_feature 1..22: note = MG3-6 AAVS1 GuideD4
  source 1..22: mol_type = other DNA
ggtttgcttacgatggagccag

SEQ ID NO: 6150 - DNA, 22 bp, synthetic construct
  misc_feature 1..22: note = Description of Artificial Sequence: Synthetic oligonucleotide
  misc_feature 1..22: note = MG3-6 AAVS1 GuideE4
  source 1..22: mol_type = other DNA
atcctgggagggagagcttggc

SEQ ID NO: 6151 - DNA, 22 bp, synthetic construct
  misc_feature 1..22: note = Description of Artificial Sequence: Synthetic oligonucleotide
  misc_feature 1..22: note = MG3-6 AAVS1 GuideF4
  source 1..22: mol_type = other DNA
tggcagggggtgggagggaagg

SEQ ID NO: 6152 - DNA, 22 bp, synthetic construct
  misc_feature 1..22: note = Description of Artificial Sequence: Synthetic oligonucleotide
  misc_feature 1..22: note = MG3-6 AAVS1 GuideG4
  source 1..22: mol_type = other DNA
ccagtagccagccccgtcctgg

SEQ ID NO: 6153 - DNA, 22 bp, synthetic construct
  misc_feature 1..22: note = Description of Artificial Sequence: Synthetic oligonucleotide
  misc_feature 1..22: note = MG3-6 TIGIT Guide A1
  source 1..22: mol_type = other DNA
tgcgctggtgtctcctcctgat

SEQ ID NO: 6154 - DNA, 22 bp, synthetic construct
  misc_feature 1..22: note = Description of Artificial Sequence: Synthetic oligonucleotide
  misc_feature 1..22: note = MG3-6 TIGIT Guide B1
  source 1..22: mol_type = other DNA
tgtctcctcctgatctgggccc

SEQ ID NO: 6155 - DNA, 22 bp, synthetic construct
  misc_feature 1..22: note = Description of Artificial Sequence: Synthetic oligonucleotide
  misc_feature 1..22: note = MG3-6 TIGIT Guide C1
  source 1..22: mol_type = other DNA
tgatctgggcccaggggctgag

SEQ ID NO: 6156 - DNA, 22 bp, synthetic construct
  misc_feature 1..22: note = Description of Artificial Sequence: Synthetic oligonucleotide
  misc_feature 1..22: note = MG3-6 TIGIT Guide D1
  source 1..22: mol_type = other DNA
ggcaggctcccctcgcctcagg

SEQ ID NO: 6157 - DNA, 22 bp, synthetic construct
  misc_feature 1..22: note = Description of Artificial Sequence: Synthetic oligonucleotide
  misc_feature 1..22: note = MG3-6 TIGIT Guide E1
  source 1..22: mol_type = other DNA
cgaggggagcctgcctcagccc

SEQ ID NO: 6158 - DNA, 22 bp, synthetic construct
  misc_feature 1..22: note = Description of Artificial Sequence: Synthetic oligonucleotide
  misc_feature 1..22: note = MG3-6 TIGIT Guide F1
  source 1..22: mol_type = other DNA
gagcctgcctcagcccctgggc

SEQ ID NO: 6159 - DNA, 22 bp, synthetic construct
  misc_feature 1..22: note = Description of Artificial Sequence: Synthetic oligonucleotide
  misc_feature 1..22: note = MG3-6 TIGIT Guide G1
  source 1..22: mol_type = other DNA
cctccaccacggcacaagtgac

SEQ ID NO: 6160 - DNA, 22 bp, synthetic construct
  misc_feature 1..22: note = Description of Artificial Sequence: Synthetic oligonucleotide
  misc_feature 1..22: note = MG3-6 TIGIT Guide H1
  source 1..22: mol_type = other DNA
gacccaggtcaactgggagcag

SEQ ID NO: 6161 - DNA, 22 bp, synthetic construct
  misc_feature 1..22: note = Description of Artificial Sequence: Synthetic oligonucleotide
  misc_feature 1..22: note = MG3-6 TIGIT Guide A2
  source 1..22: mol_type = other DNA
gtggcacatctccccatccttc

SEQ ID NO: 6162 - DNA, 22 bp, synthetic construct
  misc_feature 1..22: note = Description of Artificial Sequence: Synthetic oligonucleotide
  misc_feature 1..22: note = MG3-6 TIGIT Guide B2
  source 1..22: mol_type = other DNA
atccttcaaggatcgagtggcc

SEQ ID NO: 6163 - DNA, 22 bp, synthetic construct
  misc_feature 1..22: note = Description of Artificial Sequence: Synthetic oligonucleotide
  misc_feature 1..22: note = MG3-6 TIGIT Guide C2
  source 1..22: mol_type = other DNA
tcgagtggccccaggtcccggc

SEQ ID NO: 6164 - DNA, 22 bp, synthetic construct
  misc_feature 1..22: note = Description of Artificial Sequence: Synthetic oligonucleotide
  misc_feature 1..22: note = MG3-6 TIGIT Guide D2
  source 1..22: mol_type = other DNA
cgtacactgggagaatcttcct

SEQ ID NO: 6165 - DNA, 22 bp, synthetic construct
  misc_feature 1..22: note = Description of Artificial Sequence: Synthetic oligonucleotide
  misc_feature 1..22: note = MG3-6 TIGIT Guide E2
  source 1..22: mol_type = other DNA
cagcaggaatacctgagctttc

SEQ ID NO: 6166 - DNA, 22 bp, synthetic construct
  misc_feature 1..22: note = Description of Artificial Sequence: Synthetic oligonucleotide
  misc_feature 1..22: note = MG3-6 TIGIT Guide F2
  source 1..22: mol_type = other DNA
ctgagctttctaggacctccag

SEQ ID NO: 6167 - DNA, 22 bp, synthetic construct
  misc_feature 1..22: note = Description of Artificial Sequence: Synthetic oligonucleotide
  misc_feature 1..22: note = MG3-6 TIGIT Guide G2
  source 1..22: mol_type = other DNA
ttcacggtcagcgactggaggg

SEQ ID NO: 6168 - DNA, 22 bp, synthetic construct
  misc_feature 1..22: note = Description of Artificial Sequence: Synthetic oligonucleotide
  misc_feature 1..22: note = MG3-6 TIGIT Guide H2
  source 1..22: mol_type = other DNA
gtcagcgactggagggtgaggc

SEQ ID NO: 6169 - DNA, 22 bp, synthetic construct
  misc_feature 1..22: note = Description of Artificial Sequence: Synthetic oligonucleotide
  misc_feature 1..22: note = MG3-6 TIGIT Guide A3
  source 1..22: mol_type = other DNA
gactggagggtgaggcccaggc

SEQ ID NO: 6170 - DNA, 22 bp, synthetic construct
  misc_feature 1..22: note = Description of Artificial Sequence: Synthetic oligonucleotide
  misc_feature 1..22: note = MG3-6 TIGIT Guide B3
  source 1..22: mol_type = other DNA
gggtgaggcccaggccgggacc

SEQ ID NO: 6171 - DNA, 22 bp, synthetic construct
  misc_feature 1..22: note = Description of Artificial Sequence: Synthetic oligonucleotide
  misc_feature 1..22: note = MG3-6 TIGIT Guide C3
  source 1..22: mol_type = other DNA
ggtcctgctgctcccagttgac

SEQ ID NO: 6172 - DNA, 22 bp, synthetic construct
  misc_feature 1..22: note = Description of Artificial Sequence: Synthetic oligonucleotide
  misc_feature 1..22: note = MG3-6 TIGIT Guide D3
  source 1..22: mol_type = other DNA
cctctagtggctgagcacggtg

SEQ ID NO: 6173 - DNA, 22 bp, synthetic construct
  misc_feature 1..22: note = Description of Artificial Sequence: Synthetic oligonucleotide
  misc_feature 1..22: note = MG3-6 TIGIT Guide E3
  source 1..22: mol_type = other DNA
tggctgagcacggtgccaggtt

SEQ ID NO: 6174 - DNA, 22 bp, synthetic construct
  misc_feature 1..22: note = Description of Artificial Sequence: Synthetic oligonucleotide
  misc_feature 1..22: note = MG3-6 TIGIT Guide F3
  source 1..22: mol_type = other DNA
gtccaggcagaagctgcacctg

SEQ ID NO: 6175 - DNA, 22 bp, synthetic construct
  misc_feature 1..22: note = Description of Artificial Sequence: Synthetic oligonucleotide
  misc_feature 1..22: note = MG3-6 TIGIT Guide G3
  source 1..22: mol_type = other DNA
gctctgtggagagcagcgggga

SEQ ID NO: 6176 - DNA, 22 bp, synthetic construct
  misc_feature 1..22: note = Description of Artificial Sequence: Synthetic oligonucleotide
  misc_feature 1..22: note = MG3-6 TIGIT Guide H3
  source 1..22: mol_type = other DNA
tgggtaactgcagcttcttcac

SEQ ID NO: 6177 - DNA, 22 bp, synthetic construct
  misc_feature 1..22: note = Description of Artificial Sequence: Synthetic oligonucleotide
  misc_feature 1..22: note = MG3-6 TIGIT Guide A4
  source 1..22: mol_type = other DNA
tctgtgaagaagctgcagttac

SEQ ID NO: 6178 - DNA, 22 bp, synthetic construct
  misc_feature 1..22: note = Description of Artificial Sequence: Synthetic oligonucleotide
  misc_feature 1..22: note = MG3-6 TIGIT Guide B4
  source 1..22: mol_type = other DNA
cttcctgggggtgagggagcac

SEQ ID NO: 6179 - DNA, 22 bp, synthetic construct
  misc_feature 1..22: note = Description of Artificial Sequence: Synthetic oligonucleotide
  misc_feature 1..22: note = MG3-6 TIGIT Guide C4
  source 1..22: mol_type = other DNA
tcctgtccagctgattttctcc

SEQ ID NO: 6180 - DNA, 22 bp, synthetic construct
  misc_feature 1..22: note = Description of Artificial Sequence: Synthetic oligonucleotide
  misc_feature 1..22: note = MG3-6 TIGIT Guide D4
  source 1..22: mol_type = other DNA
tcctgaggtcaccttccacaga

SEQ ID NO: 6181 - DNA, 22 bp, synthetic construct
  misc_feature 1..22: note = Description of Artificial Sequence: Synthetic oligonucleotide
  misc_feature 1..22: note = MG3-6 TIGIT Guide E4
  source 1..22: mol_type = other DNA
caccttccacagaatggattct

SEQ ID NO: 6182 - DNA, 22 bp, synthetic construct
  misc_feature 1..22: note = Description of Artificial Sequence: Synthetic oligonucleotide
  misc_feature 1..22: note = MG3-6 CD38 guide A1
  source 1..22: mol_type = other DNA
ctgaaattcatcctgagatgag

SEQ ID NO: 6183 - DNA, 22 bp, synthetic construct
  misc_feature 1..22: note = Description of Artificial Sequence: Synthetic oligonucleotide
  misc_feature 1..22: note = MG3-6 CD38 guide B1
  source 1..22: mol_type = other DNA
ttagtcgccaacccacctcatc

SEQ ID NO: 6184 - DNA, 22 bp, synthetic construct
  misc_feature 1..22: note = Description of Artificial Sequence: Synthetic oligonucleotide
  misc_feature 1..22: note = MG3-6 CD38 guide C1
  source 1..22: mol_type = other DNA
acgaccaccgcgagcaccacga

SEQ ID NO: 6185 - DNA, 22 bp, synthetic construct
  misc_feature 1..22: note = Description of Artificial Sequence: Synthetic oligonucleotide
  misc_feature 1..22: note = MG3-6 CD38 guide D1
  source 1..22: mol_type = other DNA
agcaccacgacgaggatcagga

SEQ ID NO: 6186 - DNA, 22 bp, synthetic construct
  misc_feature 1..22: note = Description of Artificial Sequence: Synthetic oligonucleotide
  misc_feature 1..22: note = MG3-6 CD38 guide E1
  source 1..22: mol_type = other DNA
ggatactgacgccaagacagag

SEQ ID NO: 6187 - DNA, 22 bp, synthetic construct
  misc_feature 1..22: note = Description of Artificial Sequence: Synthetic oligonucleotide
  misc_feature 1..22: note = MG3-6 CD38 guide F1
  source 1..22: mol_type = other DNA
gggctctcctagagagccggca

SEQ ID NO: 6188 - DNA, 22 bp, synthetic construct
  misc_feature 1..22: note = Description of Artificial Sequence: Synthetic oligonucleotide
  misc_feature 1..22: note = MG3-6 CD38 guide G1
  source 1..22: mol_type = other DNA
ggctctcctagagagccggcag

SEQ ID NO: 6189 - DNA, 22 bp, synthetic construct
  misc_feature 1..22: note = Description of Artificial Sequence: Synthetic oligonucleotide
  misc_feature 1..22: note = MG3-6 CD38 guide H1
  source 1..22: mol_type = other DNA
cagcagggtttgtccccggaca

SEQ ID NO: 6190 - DNA, 22 bp, synthetic construct
  misc_feature 1..22: note = Description of Artificial Sequence: Synthetic oligonucleotide
  misc_feature 1..22: note = MG3-6 CD38 guide A2
  source 1..22: mol_type = other DNA
gggctgaactcgcagttggcca

SEQ ID NO: 6191 - DNA, 22 bp, synthetic construct
  misc_feature 1..22: note = Description of Artificial Sequence: Synthetic oligonucleotide
  misc_feature 1..22: note = MG3-6 CD38 guide B2
  source 1..22: mol_type = other DNA
gcagttggccatagggctccag

SEQ ID NO: 6192 - DNA, 22 bp, synthetic construct
  misc_feature 1..22: note = Description of Artificial Sequence: Synthetic oligonucleotide
  misc_feature 1..22: note = MG3-6 CD38 guide C2
  source 1..22: mol_type = other DNA
cagttggccatagggctccagg

SEQ ID NO: 6193 - DNA, 22 bp, synthetic construct
  misc_feature 1..22: note = Description of Artificial Sequence: Synthetic oligonucleotide
  misc_feature 1..22: note = MG3-6 CD38 guide D2
  source 1..22: mol_type = other DNA
gacatgtagactgccaaagtgt

SEQ ID NO: 6194 - DNA, 22 bp, synthetic construct
  misc_feature 1..22: note = Description of Artificial Sequence: Synthetic oligonucleotide
  misc_feature 1..22: note = MG3-6 CD38 guide E2
  source 1..22: mol_type = other DNA
gccaaagtgtatgggatgcttt

SEQ ID NO: 6195 - DNA, 22 bp, synthetic construct
  misc_feature 1..22: note = Description of Artificial Sequence: Synthetic oligonucleotide
  misc_feature 1..22: note = MG3-6 CD38 guide F2
  source 1..22: mol_type = other DNA
atagtcttcttcagtaatgttg

SEQ ID NO: 6196 - DNA, 22 bp, synthetic construct
  misc_feature 1..22: note = Description of Artificial Sequence: Synthetic oligonucleotide
  misc_feature 1..22: note = MG3-6 CD38 guide G2
  source 1..22: mol_type = other DNA
gttcaccctggaggacacgctg

SEQ ID NO: 6197 - DNA, 22 bp, synthetic construct
  misc_feature 1..22: note = Description of Artificial Sequence: Synthetic oligonucleotide
  misc_feature 1..22: note = MG3-6 CD38 guide H2
  source 1..22: mol_type = other DNA
gtggtgaattcaacacttccag

SEQ ID NO: 6198 - DNA, 22 bp, synthetic construct
  misc_feature 1..22: note = Description of Artificial Sequence: Synthetic oligonucleotide
  misc_feature 1..22: note = MG3-6 CD38 guide A3
  source 1..22: mol_type = other DNA
aggtagcctagcagcgtgtcct

SEQ ID NO: 6199 - DNA, 22 bp, synthetic construct
  misc_feature 1..22: note = Description of Artificial Sequence: Synthetic oligonucleotide
  misc_feature 1..22: note = MG3-6 CD38 guide B3
  source 1..22: mol_type = other DNA
gtattctggaaaacggtttccc

SEQ ID NO: 6200 - DNA, 22 bp, synthetic construct
  misc_feature 1..22: note = Description of Artificial Sequence: Synthetic oligonucleotide
  misc_feature 1..22: note = MG3-6 CD38 guide C3
  source 1..22: mol_type = other DNA
aaccgttttccagaatactgaa

SEQ ID NO: 6201 - DNA, 22 bp, synthetic construct
  misc_feature 1..22: note = Description of Artificial Sequence: Synthetic oligonucleotide
  misc_feature 1..22: note = MG3-6 CD38 guide D3
  source 1..22: mol_type = other DNA
accgttttccagaatactgaaa

SEQ ID NO: 6202 - DNA, 22 bp, synthetic construct
  misc_feature 1..22: note = Description of Artificial Sequence: Synthetic oligonucleotide
  misc_feature 1..22: note = MG3-6 CD38 guide E3
  source 1..22: mol_type = other DNA
tgtttttgtcaaagattttact

SEQ ID NO: 6203 - DNA, 22 bp, synthetic construct
  misc_feature 1..22: note = Description of Artificial Sequence: Synthetic oligonucleotide
  misc_feature 1..22: note = MG3-6 CD38 guide F3
  source 1..22: mol_type = other DNA
aagtccataatttgcaaccaga

SEQ ID NO: 6204 - DNA, 22 bp, synthetic construct
  misc_feature 1..22: note = Description of Artificial Sequence: Synthetic oligonucleotide
  misc_feature 1..22: note = MG3-6 CD38 guide G3
  source 1..22: mol_type = other DNA
ctttcttccccagagacttatg

SEQ ID NO: 6205 - DNA, 22 bp, synthetic construct
  misc_feature 1..22: note = Description of Artificial Sequence: Synthetic oligonucleotide
  misc_feature 1..22: note = MG3-6 CD38 guide H3
  source 1..22: mol_type = other DNA
aatcgattccagctcttttatg

SEQ ID NO: 6206 - DNA, 22 bp, synthetic construct
  misc_feature 1..22: note = Description of Artificial Sequence: Synthetic oligonucleotide
  misc_feature 1..22: note = MG3-6 CD38 guide A4
  source 1..22: mol_type = other DNA
ttcttcagtgtgtgaaaaatcc

SEQ ID NO: 6207 - DNA, 22 bp, synthetic construct
  misc_feature 1..22: note = Description of Artificial Sequence: Synthetic oligonucleotide
  misc_feature 1..22: note = MG3-6 CD38 guide B4
  source 1..22: mol_type = other DNA
ctcagatgtgcaagatgaatcc

SEQ ID NO: 6208 - DNA, 22 bp, synthetic construct
  misc_feature 1..22: note = Description of Artificial Sequence: Synthetic oligonucleotide
  misc_feature 1..22: note = MG3-6 CD38 guide C4
  source 1..22: mol_type = other DNA
cgggcaccaccaagcgctttcc

SEQ ID NO: 6209 - DNA, 22 bp, synthetic construct
  misc_feature 1..22: note = Description of Artificial Sequence: Synthetic oligonucleotide
  misc_feature 1..22: note = MG3-6 CD38 guide D4
  source 1..22: mol_type = other DNA
ctgaaattcatcctgagatgag

SEQ ID NO: 6210 - DNA, 22 bp, synthetic construct
  misc_feature 1..22: note = Description of Artificial Sequence: Synthetic oligonucleotide
  misc_feature 1..22: note = MG3-6 CD38 guide E4
  source 1..22: mol_type = other DNA
tcgggaaagcgcttggtggtgc

SEQ ID NO: 6211 - DNA, 22 bp, synthetic construct
  misc_feature 1..22: note = Description of Artificial Sequence: Synthetic oligonucleotide
  misc_feature 1..22: note = MG3-6 CD38 guide F4
  source 1..22: mol_type = other DNA
cgaccaccgcgagcaccacgac

SEQ ID NO: 6212 - DNA, 22 bp, synthetic construct
  misc_feature 1..22: note = Description of Artificial Sequence: Synthetic oligonucleotide
  misc_feature 1..22: note = MG3-6 CD38 guide G4
  source 1..22: mol_type = other DNA
ccgcgagcaccacgacgaggat

SEQ ID NO: 6213 - DNA, 22 bp, synthetic construct
  misc_feature 1..22: note = Description of Artificial Sequence: Synthetic oligonucleotide
  misc_feature 1..22: note = MG3-6 CD38 guide H4
  source 1..22: mol_type = other DNA
ggatactgacgccaagacagag

SEQ ID NO: 6214 - DNA, 22 bp, synthetic construct
  misc_feature 1..22: note = Description of Artificial Sequence: Synthetic oligonucleotide
  misc_feature 1..22: note = MG3-6 CD38 guide A5
  source 1..22: mol_type = other DNA
ggctctcctagagagccggcag

SEQ ID NO: 6215 - DNA, 22 bp, synthetic construct
  misc_feature 1..22: note = Description of Artificial Sequence: Synthetic oligonucleotide
  misc_feature 1..22: note = MG3-6 CD38 guide B5
  source 1..22: mol_type = other DNA
cagcagggtttgtccccggaca

SEQ ID NO: 6216 - DNA, 22 bp, synthetic construct
  misc_feature 1..22: note = Description of Artificial Sequence: Synthetic oligonucleotide
  misc_feature 1..22: note = MG3-6 CD38 guide C5
  source 1..22: mol_type = other DNA
gggctgaactcgcagttggcca

SEQ ID NO: 6217 - DNA, 22 bp, synthetic construct
  misc_feature 1..22: note = Description of Artificial Sequence: Synthetic oligonucleotide
  misc_feature 1..22: note = MG3-6 CD38 guide D5
  source 1..22: mol_type = other DNA
cagttggccatagggctccagg

SEQ ID NO: 6218 - DNA, 22 bp, synthetic construct
  misc_feature 1..22: note = Description of Artificial Sequence: Synthetic oligonucleotide
  misc_feature 1..22: note = MG3-6 CD38 guide E5
  source 1..22: mol_type = other DNA
ttctgtgttttatctcagacat

SEQ ID NO: 6219 - DNA, 22 bp, synthetic construct
  misc_feature 1..22: note = Description of Artificial Sequence: Synthetic oligonucleotide
  misc_feature 1..22: note = MG3-6 CD38 guide F5
  source 1..22: mol_type = other DNA
acatccttgcaacattactgaa

SEQ ID NO: 6220 - DNA, 22 bp, synthetic construct
  misc_feature 1..22: note = Description of Artificial Sequence: Synthetic oligonucleotide
  misc_feature 1..22: note = MG3-6 CD38 guide G5
  source 1..22: mol_type = other DNA
agccactaatgaagttgggaac

SEQ ID NO: 6221 - DNA, 22 bp, synthetic construct
  misc_feature 1..22: note = Description of Artificial Sequence: Synthetic oligonucleotide
  misc_feature 1..22: note = MG3-6 CD38 guide H5
  source 1..22: mol_type = other DNA
gattcttctttggagcagaata

SEQ ID NO: 6222 - DNA, 22 bp, synthetic construct
  misc_feature 1..22: note = Description of Artificial Sequence: Synthetic oligonucleotide
  misc_feature 1..22: note = MG3-6 CD38 guide A6
  source 1..22: mol_type = other DNA
aagatctggcccatcagttcac

SEQ ID NO: 6223 - DNA, 22 bp, synthetic construct
  misc_feature 1..22: note = Description of Artificial Sequence: Synthetic oligonucleotide
  misc_feature 1..22: note = MG3-6 CD38 guide B6
  source 1..22: mol_type = other DNA
gttcaccctggaggacacgctg

SEQ ID NO: 6224 - DNA, 22 bp, synthetic construct
  misc_feature 1..22: note = Description of Artificial Sequence: Synthetic oligonucleotide
  misc_feature 1..22: note = MG3-6 CD38 guide C6
  source 1..22: mol_type = other DNA
gtggtgaattcaacacttccag

SEQ ID NO: 6225 - DNA, 22 bp, synthetic construct
  misc_feature 1..22: note = Description of Artificial Sequence: Synthetic oligonucleotide
  misc_feature 1..22: note = MG3-6 CD38 guide D6
  source 1..22: mol_type = other DNA
attcaacacttccagtgaggct

SEQ ID NO: 6226 - DNA, 22 bp, synthetic construct
  misc_feature 1..22: note = Description of Artificial Sequence: Synthetic oligonucleotide
  misc_feature 1..22: note = MG3-6 CD38 guide E6
  source 1..22: mol_type = other DNA
gtgttgaattcaccacaccatg

SEQ ID NO: 6227 - DNA, 22 bp, synthetic construct
  misc_feature 1..22: note = Description of Artificial Sequence: Synthetic oligonucleotide
  misc_feature 1..22: note = MG3-6 CD38 guide F6
  source 1..22: mol_type = other DNA
cctccagggtgaacatgtcccg

SEQ ID NO: 6228 - DNA, 22 bp, synthetic construct
  misc_feature 1..22: note = Description of Artificial Sequence: Synthetic oligonucleotide
  misc_feature 1..22: note = MG3-6 CD38 guide G6
  source 1..22: mol_type = other DNA
cccgctggacctgtgtgaactg

SEQ ID NO: 6229 - DNA, 22 bp, synthetic construct
  misc_feature 1..22: note = Description of Artificial Sequence: Synthetic oligonucleotide
  misc_feature 1..22: note = MG3-6 CD38 guide H6
  source 1..22: mol_type = other DNA
tggacctgtgtgaactgatggg

SEQ ID NO: 6230 - DNA, 22 bp, synthetic construct
  misc_feature 1..22: note = Description of Artificial Sequence: Synthetic oligonucleotide
  misc_feature 1..22: note = MG3-6 CD38 guide A7
  source 1..22: mol_type = other DNA
agaaataaactatcaatcttgc

SEQ ID NO: 6231 - DNA, 22 bp, synthetic construct
  misc_feature 1..22: note = Description of Artificial Sequence: Synthetic oligonucleotide
  misc_feature 1..22: note = MG3-6 CD38 guide B7
  source 1..22: mol_type = other DNA
tcaatcttgcccagactggaga

SEQ ID NO: 6232 - DNA, 22 bp, synthetic construct
  misc_feature 1..22: note = Description of Artificial Sequence: Synthetic oligonucleotide
  misc_feature 1..22: note = MG3-6 CD38 guide C7
  source 1..22: mol_type = other DNA
accgttttccagaatactgaaa

SEQ ID NO: 6233 - DNA, 22 bp, synthetic construct
  misc_feature 1..22: note = Description of Artificial Sequence: Synthetic oligonucleotide
  misc_feature 1..22: note = MG3-6 CD38 guide D7
  source 1..22: mol_type = other DNA
gcagtcctttctccagtctggg

SEQ ID NO: 6234 - DNA, 22 bp, synthetic construct
  misc_feature 1..22: note = Description of Artificial Sequence: Synthetic oligonucleotide
  misc_feature 1..22: note = MG3-6 CD38 guide E7
  source 1..22: mol_type = other DNA
gatgtggtccatgtgatgctca

SEQ ID NO: 6235 - DNA, 22 bp, synthetic construct
  misc_feature 1..22: note = Description of Artificial Sequence: Synthetic oligonucleotide
  misc_feature 1..22: note = MG3-6 CD38 guide F7
  source 1..22: mol_type = other DNA
taaatgtgtacctgtttttgtc

SEQ ID NO: 6236 - DNA, 22 bp, synthetic construct
  misc_feature 1..22: note = Description of Artificial Sequence: Synthetic oligonucleotide
  misc_feature 1..22: note = MG3-6 CD38 guide G7
  source 1..22: mol_type = other DNA
gtttttgtcaaagattttactg

SEQ ID NO: 6237 - DNA, 22 bp, synthetic construct
  misc_feature 1..22: note = Description of Artificial Sequence: Synthetic oligonucleotide
  misc_feature 1..22: note = MG3-6 CD38 guide H7
  source 1..22: mol_type = other DNA
tgcgggatccattgagcatcac

SEQ ID NO: 6238 - DNA, 22 bp, synthetic construct
  misc_feature 1..22: note = Description of Artificial Sequence: Synthetic oligonucleotide
  misc_feature 1..22: note = MG3-6 CD38 guide A8
  source 1..22: mol_type = other DNA
aagtccataatttgcaaccaga

SEQ ID NO: 6239 - DNA, 22 bp, synthetic construct
  misc_feature 1..22: note = Description of Artificial Sequence: Synthetic oligonucleotide
  misc_feature 1..22: note = MG3-6 CD38 guide B8
  source 1..22: mol_type = other DNA
aaccagagaaggttcagacact

SEQ ID NO: 6240 - DNA, 22 bp, synthetic construct
  misc_feature 1..22: note = Description of Artificial Sequence: Synthetic oligonucleotide
  misc_feature 1..22: note = MG3-6 CD38 guide C8
  source 1..22: mol_type = other DNA
ctgggtgatacatggtggaaga

SEQ ID NO: 6241 - DNA, 22 bp, synthetic construct
  misc_feature 1..22: note = Description of Artificial Sequence: Synthetic oligonucleotide
  misc_feature 1..22: note = MG3-6 CD38 guide D8
  source 1..22: mol_type = other DNA
cttctcttccaccatgtatcac

SEQ ID NO: 6242 - DNA, 22 bp, synthetic construct
  misc_feature 1..22: note = Description of Artificial Sequence: Synthetic oligonucleotide
  misc_feature 1..22: note = MG3-6 CD38 guide E8
  source 1..22: mol_type = other DNA
gaaccttctctggttgcaaatt

SEQ ID NO: 6243 - DNA, 22 bp, synthetic construct
  misc_feature 1..22: note = Description of Artificial Sequence: Synthetic oligonucleotide
  misc_feature 1..22: note = MG3-6 CD38 guide F8
  source 1..22: mol_type = other DNA
tttcttccccagagacttatgc

SEQ ID NO: 6244 - DNA, 22 bp, synthetic construct
  misc_feature 1..22: note = Description of Artificial Sequence: Synthetic oligonucleotide
  misc_feature 1..22: note = MG3-6 CD38 guide G8
  source 1..22: mol_type = other DNA
atcgattccagctcttttatgg

SEQ ID NO: 6245 - DNA, 22 bp, synthetic construct
  misc_feature 1..22: note = Description of Artificial Sequence: Synthetic oligonucleotide
  misc_feature 1..22: note = MG3-6 CD38 guide H8
  source 1..22: mol_type = other DNA
tcttcagtgtgtgaaaaatcct

SEQ ID NO: 6246 - DNA, 22 bp, synthetic construct
  misc_feature 1..22: note = Description of Artificial Sequence: Synthetic oligonucleotide
  misc_feature 1..22: note = MG3-6 CD38 guide A9
  source 1..22: mol_type = other DNA
ctgaggattcatcttgcacatc

SEQ ID NO: 6247 - DNA, 22 bp, synthetic construct
  misc_feature 1..22: note = Description of Artificial Sequence: Synthetic oligonucleotide
  misc_feature 1..22: note = MG3-6 CD38 guide B9
  source 1..22: mol_type = other DNA
tcagatgtgcaagatgaatcct

SEQ ID NO: 6248 - DNA, 22 bp, synthetic construct
  misc_feature 1..22: note = Description of Artificial Sequence: Synthetic oligonucleotide
  misc_feature 1..22: note = MG3-6 CD38 guide C9
  source 1..22: mol_type = other DNA
tttcacacactgaagaaacttg

SEQ ID NO: 6249 - DNA, 22 bp, synthetic construct
  misc_feature 1..22: note = Description of Artificial Sequence: Synthetic oligonucleotide
  misc_feature 1..22: note = MG3-8 CD38 Guide A1
  source 1..22: mol_type = other DNA
ctgaaattcatcctgagatgag

SEQ ID NO: 6250 - DNA, 22 bp, synthetic construct
  misc_feature 1..22: note = Description of Artificial Sequence: Synthetic oligonucleotide
  misc_feature 1..22: note = MG3-8 CD38 Guide B1
  source 1..22: mol_type = other DNA
ggctctcctagagagccggcag

SEQ ID NO: 6251 - DNA, 22 bp, synthetic construct
  misc_feature 1..22: note = Description of Artificial Sequence: Synthetic oligonucleotide
  misc_feature 1..22: note = MG3-8 CD38 Guide C1
  source 1..22: mol_type = other DNA
cagttggccatagggctccagg

SEQ ID NO: 6252 - DNA, 22 bp, synthetic construct
  misc_feature 1..22: note = Description of Artificial Sequence: Synthetic oligonucleotide
  misc_feature 1..22: note = MG3-8 CD38 Guide D1
  source 1..22: mol_type = other DNA
aagatctggcccatcagttcac

SEQ ID NO: 6253 - DNA, 22 bp, synthetic construct
  misc_feature 1..22: note = Description of Artificial Sequence: Synthetic oligonucleotide
  misc_feature 1..22: note = MG3-8 CD38 Guide E1
  source 1..22: mol_type = other DNA
gtgttgaattcaccacaccatg

SEQ ID NO: 6254 - DNA, 22 bp, synthetic construct
  misc_feature 1..22: note = Description of Artificial Sequence: Synthetic oligonucleotide
  misc_feature 1..22: note = MG3-8 CD38 Guide F1
  source 1..22: mol_type = other DNA
accgttttccagaatactgaaa

SEQ ID NO: 6255 - DNA, 22 bp, synthetic construct
  misc_feature 1..22: note = Description of Artificial Sequence: Synthetic oligonucleotide
  misc_feature 1..22: note = MG3-8 CD38 Guide G1
  source 1..22: mol_type = other DNA
aagtccataatttgcaaccaga

SEQ ID NO: 6256 - DNA, 22 bp, synthetic construct
  misc_feature 1..22: note = Description of Artificial Sequence: Synthetic oligonucleotide
  misc_feature 1..22: note = MG3-8 CD38 Guide H1
  source 1..22: mol_type = other DNA
tttcacacactgaagaaacttg

SEQ ID NO: 6257 - protein, 1141 aa, unidentified
  REGION 1..1141: note = Description of Unknown: uncultivated organism with predicted taxonomy: Butyrivibrio sp. CAG:318
  REGION 1..1141: note = MG3a-4 active effector
MLSSLTCVDILRSHCRAKRKGAIVAECIYRVGIDVGDRSVGLVAVEFDENGVPLRFLEKLVVRHDGGLDPDTGKTPQSRKATAGVARRTRRMRKRKRQRLKALDRYLAEHGYPDVQPQITPYDAWHARARLVSTKVDDPAQLKNDLALALRHIARHRGWRNPWKTLASTRKLPVPSETLLANQARAREHFGDEVNDSTTVGQIGALAASRDYLLRPRNITVTKGVNQKKNVNDLERSSEEALAAGHPTAPILGWQVRQEDQINEVERIWERQGLPSEELPQILTLLFAQTKPHVPSERVGRDALQPKLYRAPIAALEFQDFRILAAIANLRVRTEGGRRLTKDERFTAFQFMSGWREKEPLSWADVAEELGFSAHALAAPTTETNQRLAFAPTNRTLTTLGTFFKGKKIDAGAREWWQSASYAERSLLAQLIADATPDTQEQADASGLSDVLLQWDEDTVADLMELDLQSGRAAYSTDTLLRLNARMENDGTDLFESIQAEFNIDPSRLPRPDWDDQTGQPTVDRVLTIVRRFVGGCERKYGKPESVTVEHVRTGLMGAEQRSSIIAENNRNRRDSDRIRAELQADGLSEPSRLDVRRHRQVQRQNCTCLYCGTPITTTTSELDHIVPRRGGGSSQGSNLVAVCRECNASKAHRIFAEWAEDSQREGVSVKEAAKRVRHWLNASASMKREVTRRLQQKRTDPPIDERDLASTSYAATEITRRILGHFHDEVPVVAFGGSGTREARRAGRVDHIIRLRGSLDKSRLDTRHHAIDAAVLTLQSPAIYRVLLTRVNLKHEHEVTGEAPEWRDYEGADQAEKVLYRRWQKNIATLAELMRQEIENNRVPVTRPIRLRKSRGAVHDATVMKALERDLWGEWDAQAIDRLVDPELHLALRKLFTSTKSKKIDVDATSQGLPERYLANQTVQLFDADAPSVMSPRGILRIGAGTHHARLLTWDDPKKGPQLGIQRVFAAEFGEILKDASSNDLFEAPIPFHTMSHRDLQPKVRAAVEQGLTRQIGWITQGDELEIDPADFVGEANAFGNFLREFPERSWSIAGLKKSNTIVIRPLLLSQEGVTAAISPHAAKIVENGIELSNSTLFTAPGTGIIRRTGLGRPRWDSGPAHLPESFNVHARMTQQSARD

SEQ ID NO: 6258-6278 - skipped (21 entries)

SEQ ID NO: 6279 - RNA, 94 nt, synthetic construct
  source 1..94: mol_type = other RNA
nnnnnnnnnnnnnnnnnnnngttttgacttgaaaaagtcttaactgatttagccccgcagtgaccactgcttgcacgtcactgcggggcctttt

SEQ ID NO: 6280 - RNA, 120 nt, synthetic construct
  source 1..120: mol_type = other RNA
nnnnnnnnnnnnnnnnnnnnnnnngctttgccttgattccagaaatggaatcaagacaaagttagataacgcaaactgcgtccctatccgccaagcggatacacctgttcaaaagcgttt

SEQ ID NO: 6281 - RNA, 108 nt, synthetic construct
  source 1..108: mol_type = other RNA
nnnnnnnnnnnnnnnnnnnnnnnngttttgccttgaaaaaggacaaaattagtggctcaaatttgaacactgcgcgttcatacggcacttcaaatatgaaagagtttt

SEQ ID NO: 6282 - RNA, 113 nt, synthetic construct
  source 1..113: mol_type = other RNA
nnnnnnnnnnnnnnnnnnnngttgggaatcttgaaaaagattcccaataaggcacatttttagtgctgacttctcaccgtccagggttcattgaacaatgggcggtatgtttt

SEQ ID NO: 6283 - RNA, 124 nt, synthetic construct
  source 1..124: mol_type = other RNA
nnnnnnnnnnnnnnnnnnnngttgagaatctttcattagaaataacgaaagattcttaataaggcgtccttccgatgctgacttctcaccgtccgttttccaataggagcgggcggtatgtttt

SEQ ID NO: 6284 - RNA, 116 nt, synthetic construct
  source 1..116: mol_type = other RNA
nnnnnnnnnnnnnnnnnnnngttgggaatcgtcactgaaaagtgacgattctcaacaaaagacttttgtcttgatttctttatcccccggcattttgtgccgggggattcgttatt

SEQ ID NO: 6285 - RNA, 97 nt, synthetic construct
  source 1..97: mol_type = other RNA
nnnnnnnnnnnnnnnnnnnngtttcaatgaaaattgaaataagcggtttcgtaccgtgaattctccagcccctcggtttaccggggggcttcgtttt

SEQ ID NO: 6286 - RNA, 137 nt, synthetic construct
  source 1..137: mol_type = other RNA
nnnnnnnnnnnnnnnnnnnnnnnngttgtagttccctgaaaaacgaaagtatttcaggttcctgcaataaggtctagctgttatgctagtaccgcaaagctctggcggcttaccttcatggtaggtcgccatctttt

SEQ ID NO: 6287 - RNA, 125 nt, synthetic construct
  source 1..125: mol_type = other RNA
nnnnnnnnnnnnnnnnnnnnnnnngttgtaattccctggaaacaggttattacaataaggtccaacaggactgttggtaccgtaaagatctaacggtgcgcctttgggcgcaccgttagagtttt

SEQ ID NO: 6288 - RNA, 127 nt, synthetic construct
  source 1..127: mol_type = other RNA
nnnnnnnnnnnnnnnnnnnnnnnngttgtagttccctagaaataggttgttacaataaggtccggcaggagtgccggtaccgtaaagctctaacggcgtgcctattattaggtacgccgttatcttt

SEQ ID NO: 6289 - RNA, 118 nt, synthetic construct
  source 1..118: mol_type = other RNA
nnnnnnnnnnnnnnnnnnnngttgtagttccctagaaataggttattacaataaggtccaacgtagttggtaccgcaaagctctaacggtatgccttttggcataccgttatcttttt

SEQ ID NO: 6290 - RNA, 124 nt, synthetic construct
  source 1..124: mol_type = other RNA
nnnnnnnnnnnnnnnnnnnnnnnngttgtagttccctagaaataggttattacaataaggtccaacaggagtgttggtaccgcaaagctctaacggtacgcctattggcgtaccgttatctttt

SEQ ID NO: 6291 - RNA, 135 nt, synthetic construct
  source 1..135: mol_type = other RNA
nnnnnnnnnnnnnnnnnnnnnnnngttgtagttccttattgaaaaataggttattacaataagacctggattttattgtaaaatctatgagtcgtaaagctctagctgtcctctaaagggcagctatcttcatat

SEQ ID NO: 6292 - RNA, 145 nt, synthetic construct
  source 1..145: mol_type = other RNA
nnnnnnnnnnnnnnnnnnnnnnnngttataccacttcggtggcataagccgcttttattatagcatattgtcaggttctgtcaagagattttaaaaatattacacgacaattgtgcagcgtgacaattgcataagtaaatgtttt

SEQ ID NO: 6293 - RNA, 125 nt, synthetic construct
  source 1..125: mol_type = other RNA
nnnnnnnnnnnnnnnnnnnnnnnngttgtgaattgcgaaagcaattcacaataaggattattccgttgtgaaaacatttaaagcggctttacagcacattgtgtttgtgaagtcgttttcttttt

SEQ ID NO: 6294 - RNA, 122 nt, synthetic construct
  source 1..122: mol_type = other RNA
nnnnnnnnnnnnnnnnnnnnnnnngttgtgaattgcttgaaaaagcaattcgcaataaggattattccgttgtgaaaacatttcgagtggcttcgtgaatattcacgaagtcacttcgtttt

SEQ ID NO: 6295 - RNA, 119 nt, synthetic construct
  source 1..119: mol_type = other RNA
nnnnnnnnnnnnnnnnnnnnnnnngtttgagaacctgaaaaggtgagtgcaaataaggttttaaccgacattgtttacgcacattggtgctataaaaaaggctttttaagccttttttt

SEQ ID NO: 6296 - RNA, 98 nt, synthetic construct
  source 1..98: mol_type = other RNA
nnnnnnnnnnnnnnnnnnnngtttgagaacctgaaaaggtgagtgcaaataaggctttagccgacatcgtttacctgcattgtgcagtgacttttttt

SEQ ID NO: 6297 - RNA, 136 nt, synthetic construct
  source 1..136: mol_type = other RNA
nnnnnnnnnnnnnnnnnnnnnnnngttataggttgcttctgaaaagaagcaaccgtttatataataaagaatattttctgtggggttttacgattatgtatcccctgatgccgtccccaaaacggggacggctttt

SEQ ID NO: 6298 - RNA, 146 nt, synthetic construct
  source 1..146: mol_type = other RNA
nnnnnnnnnnnnnnnnnnnnnnnnnnnnnngttgcggattgacagaaatgtctggggttcgccccgttgcgtcgcaagacgcatatccgttaacaaggattttaatccaccaaataagagaccgaacttttgttcggtctcgtttt

SEQ ID NO: 6299 - RNA, 117 nt, synthetic construct
  source 1..117: mol_type = other RNA
nnnnnnnnnnnnnnnnnnnnnnnnnnnnnngttgcggattgacttgaaaaagttgtccgttaacaaggaatttatttccaccaaataagggcgatgcttttgcatcgcctctttttg

SEQ ID NO: 6300 - RNA, 151 nt, synthetic construct
  source 1..151: mol_type = other RNA
nnnnnnnnnnnnnnnnnnnnnnnngttgtagctccctctctgaaaagagccgttgctacaataaggccgtcattcatttgatgtgccgtggggtcactgtccggtcgcaagaccggacatcccctaaaccaccctcactccccatccattt

SEQ ID NO: 6301 - RNA, 149 nt, synthetic construct
  source 1..149: mol_type = other RNA
nnnnnnnnnnnnnnnnnnnngttgtgggttgcggacaggcgaaagcctgcgcagcttctcataacaaggagttccgcaaggaattccgcaggcaaccactgtccttcgggacgtggacccaccttggccgcccgcaagggcggcctttt

SEQ ID NO: 6302 - skipped
